(19) United States
(12) Patent Application Publication
(10) Pub. No.: US 2012/0028320 A1
(43) Pub. Date: Feb. 2, 2012

(54) PREPARATION OF ADIPIC ACID

(75) Inventors: Petronella Catharina Raemakers-Franken, Budel (NL); Martin Schürmann, Julich (DE); Axel Christoph Trefzer, Tegernheim (DE); Stefaan Marie André De Wildeman, Maasmechelen (BE)

(73) Assignee: DSM IP ASSETS B.V., Heerlen (NL)

(21) Appl. No.: 13/255,473

(22) PCT Filed: Mar. 11, 2010
(86) PCT No.: PCT/NL2010/050127

§ 371 Date: Sep. 8, 2011

(30) Foreign Application Priority Data
Mar. 11, 2009 (EP) 09154840.4
Sep. 11, 2009 (EP) 09170092.2
Dec. 22, 2009 (EP) 09180441.9

(51) Int. Cl. C12P 7/44; C12P 7/62; C12N 1/21; C12N 1/15; C12N 1/19

(52) U.S. Cl. 435/135; 435/142; 435/254.3; 435/254.5; 435/254.11; 435/254.23; 435/254.21; 435/254.22; 435/252.31; 435/252.32; 435/252.33; 435/252.3; 435/252.34

(57) ABSTRACT

The invention relates to a method for preparing adipic acid, comprising converting alpha-ketoglutaric acid (AKG) into alpha-ketoadipic acid (AKA), converting alpha-ketoadipic acid into alpha-ketopimelic acid (AKP), converting alpha-ketopimelic acid into 5-formylpentanoic acid (5-FVA), and converting 5-formylpentanoic acid into adipic acid, wherein at least one of these conversions is carried out using a heterologous biocatalyst.The invention further relates to a heterologous cell, comprising one or more heterologous nucleic acid sequences encoding one or more heterologous enzymes capable of catalysing at least one reaction step in said method.

[0001] The invention relates to a method for preparing adipic acid. The invention further relates to a method for preparing a polyamide or an ester, using adipic acid thus prepared. The invention further relates to a heterologous cell which may be used in a method according to the invention. The invention further relates to the use of a heterologous cell in the preparation of adipic acid.

[0002] Adipic acid (hexanedioic acid) is inter alia used for the production of polyamide. Further, esters of adipic acid may be used in plasticisers, lubricants, solvent and in a variety of polyurethane resins. Other uses of adipic acid are as food acidulants, applications in adhesives, insecticides, tanning and dyeing. Known preparation methods include the oxidation of cyclohexanol or cyclohexanone or a mixture thereof (KA oil) with nitric acid.

[0003] In view of a growing desire to prepare materials using more sustainable technology it would be desirable to provide a method wherein adipic acid is prepared from an intermediate compound that can be obtained from a biologically renewable source or at least from an intermediate compound that is converted into adipic acid using a biochemical method. Further, it would be desirable to provide a method that requires less energy than conventional chemical processes making use of bulk chemicals from petrochemical origin.

[0004] It is an object of the invention to provide a novel method for preparing adipic acid.

[0005] It is further an object to provide a novel biocatalyst, suitable for catalysing one or more reaction step in a method for preparing adipic acid.

[0006] One or more further objects which may be solved in accordance with the invention will follow from the description below.

[0007] The inventors have realised it is possible to prepare adipic acid using a specific biocatalyst.

[0008] Accordingly, the present invention relates to a method for preparing adipic acid, comprising
[0009] converting alpha-ketoglutaric acid (AKG) into alpha-ketoadipic acid (AKA),
[0010] converting alpha-ketoadipic acid into alpha-ketopimelic acid (AKP),
[0011] converting alpha-ketopimelic acid into 5-formylpentanoic acid (5-FVA), and
[0012] converting 5-formylpentanoic acid into adipic acid,
[0013] wherein at least one of these conversions is carried out using a biocatalyst, in particular a heterologous biocatalyst.

[0014] In a preferred embodiment, the conversion of AKG into AKA is catalysed by a biocatalyst.

[0015] In a further preferred embodiment, the conversion of AKA into AKP is catalysed by a biocatalyst.

[0016] In a further preferred embodiment, the conversion of AKP into 5-FVA is catalysed by a biocatalyst.

[0017] The conversion of 5-FVA into adipic acid may in particular comprise an aldehyde oxidation step, which oxidation may be carried out chemically or biocatalytically.The invention further relates to a heterologous cell, comprising one or more nucleic acid sequences encoding one or more enzymes having catalytic activity with respect to the conversion of 5-formylpentanoic acid into adipic acid.

[0018] The invention further provides a heterologous cell, comprising one or more heterologous nucleic acid sequences encoding one or more heterologous enzymes capable of catalysing at least one reaction step in the preparation of adipic acid from alpha-ketopimelic acid.

[0019] Such cell may in particular be used as a biocatalyst in a method for preparing adipic acid.

[0020] The present invention allows the preparation of adipic acid from a renewable source, without needing a petrochemical feedstock.

[0021] In particular, it is envisaged that the method of the invention can be operated in a cost-efficient and in an energy-efficient way.

[0022] The term “or” as used herein is defined as “and/or” unless specified otherwise.

[0023] The term “a” or “an” as used herein is defined as “at least one” unless specified otherwise.

[0024] When referring to a noun (e.g. a compound, an additive, etc.) in the singular, the plural is meant to be included. Thus, when referring to a specific moiety, e.g. “compound”, this means “at least one” of that moiety, e.g. “at least one compound”, unless specified otherwise.

[0025] When referred herein to carboxylic acids or carboxylates, e.g. an amino acid, 5-FVA, AKG, AKA, AKP, adipic acid/adipate, these terms are meant to include the protonated carboxylic acid (free acid), the corresponding carboxylate (its conjugated base) as well as a salt thereof, unless specified otherwise. Likewise, when referring to an amine, this is meant to include the protonated amine (typically cationic, e.g. R—NH₃⁺) and the unprotonated amine (typically uncharged, e.g. R—NH₂). When referring herein to amino acids, this term is meant to include amino acids in their zwitterionic form (in which the amino group is in the protonated and the carboxylate group is in the deprotonated form), the amino acid in which the amino group is protonated and the carboxylic group is in its neutral form, and the amino acid in which the amino group is in its neutral form and the carboxylate group is in the deprotonated form, as well as salts thereof.

[0026] When referring to a compound of which several isomers exist (e.g. a cis and a trans isomer, an R and an S enantiomer), the compound in principle includes all enantiomers, diastereomers and cis/trans isomers of that compound that may be used in the particular method of the invention.

[0027] When an enzyme is mentioned with reference to an enzyme class (EC) between brackets, the enzyme class is a class wherein the enzyme is classified or may be classified, on the basis of the Enzyme Nomenclature provided by the Nomenclature Committee of the International Union of Biochemistry and Molecular Biology (NC-IUBMB), which nomenclature may be found at htto://www.chem.gmul.ac.uk/iubmb/enzyme/. Other suitable enzymes that have not (yet) been classified in a specified class but may be classified as such, are meant to be included.

[0028] If referred herein to a protein or gene by reference to a accession number, this number in particular is used to refer to a protein or gene having a sequence as found in Uniprot on 11 Mar. 2008, unless specified otherwise.

[0029] As used herein, the term “functional analogue” of a nucleic acid at least includes other sequences encoding an enzyme having the same amino acid sequence and other sequences encoding a homologue of such enzyme.

[0030] The term “homologue” is used herein in particular for polynucleotides or polypeptides having a sequence identity of at least 30%, preferably at least 40%, more preferably at least 60%, more preferably at least 65%, more preferably at least 70%, more preferably at least 75%, more preferably at least 80%, in particular at least 85%, more in particular at least 90%, at least 91%, at least 92%, at least 93%, at least 94%, at least 95%, at least 96%, at least 97%, at least 98% or at least 99%. The term homologue is also meant to include nucleic acid sequences (polynucleotide sequences) which differ from another nucleic acid sequence due to the degeneracy of the genetic code and encode the same polypeptide sequence.

[0031] Sequence identity or similarity is herein defined as a relationship between two or more polypeptide sequences or two or more nucleic acid sequences, as determined by comparing the sequences. Usually, sequence identities or similarities are compared over the whole length of the sequences, but may however also be compared only for a part of the sequences aligning with each other. In the art, “identity” or “similarity” also means the degree of sequence relatedness between polypeptide sequences or nucleic acid sequences, as the case may be, as determined by the match between such sequences. Preferred methods to determine identity or similarity are designed to give the largest match between the sequences tested. In context of this invention a preferred computer program method to determine identity and similarity between two sequences includes BLASTP and BLASTN (Altschul, S. F. et al., J. Mol. Biol. 1990, 215, 403-410, publicly available from NCBI and other sources (BLAST Manual, Altschul, S., et al., NCBI NLM NIH Bethesda, Md. 20894). Preferred parameters for polypeptide sequence comparison using BLASTP are gap open 10.0, gap extend 0.5, Blosum 62 matrix. Preferred parameters for nucleic acid sequence comparison using BLASTN are gap open 10.0, gap extend 0.5, DNA full matrix (DNA identity matrix).

[0032] A heterologous biocatalyst, in particular a heterologous cell, as used herein, is a biocatalyst comprising a heterologous protein or a heterologous nucleic acid (usually as part of the cell's DNA or RNA) The term “heterologous” when used with respect to a nucleic acid sequence (DNA or RNA), or a protein refers to a nucleic acid or protein that does not occur naturally as part of the organism, cell, genome or DNA or RNA sequence in which it is present, or that is found in a cell or location or locations in the genome or DNA or RNA sequence that differ from that in which it is found in nature. It is understood that heterologous DNA in a heterologous organism is part of the genome of that heterologous organism. Heterologous nucleic acids or proteins are not endogenous to the cell into which they are introduced, but have been obtained from another cell or synthetically or recombinantly produced. Generally, though not necessarily, such nucleic acids encode proteins that are not normally produced by the cell in which the DNA is transcribed or expressed. Similarly heterologous RNA encodes for proteins not normally expressed in the cell in which the heterologous RNA is present. Heterologous nucleic acids and proteins may also be referred to as foreign nucleic acids or proteins. Any nucleic acid or protein that one of skill in the art would recognise as heterologous or foreign to the cell in which it is expressed is herein encompassed by the term heterologous nucleic acid or protein.

[0033] When referred to an enzyme or another biocatalytic moiety from a particular source, recombinant enzymes or other recombinant biocatalytic moieties, originating from a first organism, but actually produced in a (genetically modified) second organism, are specifically meant to be included as enzymes or other biocatalytic moieties, from that first organism.

[0034] In a method of the invention, a biocatalyst is used, i.e. at least one reaction step in the method is catalysed by a biological material or moiety derived from a biological source, for instance an organism or a biomolecule derived there from. The biocatalyst may in particular comprise one or more enzymes. A biocatalytic reaction may comprise one or more chemical conversions of which at least one is catalyzed by a biocatalyst. Thus the ‘biocatalyst’ may accelerate a chemical reaction in at least one reaction step in the preparation of AKP from AKG, at least one reaction step in the preparation of 5-FVA from AKP, or at least one reaction step in the preparation of adipic acid from 5-FVA

[0035] The biocatalyst may be used in any form. In an embodiment, one or more enzymes form part of a living organism (such as living whole cells). The enzymes may perform a catalytic function inside the cell. It is also possible that the enzyme may be secreted into a medium, wherein the cells are present. In an embodiment, one or more enzymes are used isolated from the natural environment (isolated from the organism it has been produced in), for instance as a solution, an emulsion, a dispersion, (a suspension of) freeze-dried cells, a lysate, or immobilised on a support. The use of an enzyme isolated from the organism it originates from may in particular be useful in view of an increased flexibility in adjusting the reaction conditions such that the reaction equilibrium is shifted to the desired side.

[0036] Living cells may be growing cells, resting or dormant cells (e.g. spores) or cells in a stationary phase. It is also possible to use an enzyme forming part of a permeabilised cell (i.e. made permeable to a substrate for the enzyme or a precursor for a substrate for the enzyme or enzymes).

[0037] The biocatalyst (used in a method of the invention) may in principle be any organism, or be obtained or derived from any organism. This organism may be a naturally occurring organism or a heterologous organism. The heterologous organism is typically a host cell which comprises at least one nucleic acid sequence encoding a heterologous enzyme, capable of catalysing at least one reaction step in a method of the invention. The organism from which the heterologous nucleic acid sequence originates may be may be eukaryotic or prokaryotic. In particular said organisms may be independently selected from animals (including humans), plants, bacteria, archaea, yeasts and fungi.

[0038] The host cell may be eukaryotic or prokaryotic. In an embodiment, the host cell is selected from the group of fungi, yeasts, euglenoids, archaea and bacteria. The host cell may in particular be selected from the group of genera consisting of Aspergillus, Penicillium, Ustilago, Cephalosporium, Trichophytum, Paecilomyces, Pichia, Hansenula, Saccharomyces, Candida, Kluyveromyces, Yarrowia, Bacillus, Corynebacterium, Escherichia, Azotobacter, Frankia, Rhizobium, Bradyrhizobium, Anabaena, Synechocystis, Microcystis, Klebsiella, Rhodobacter, Pseudomonas, Thermus, Deinococcus Gluconobacter, Methanococcus, Methanobacterium, Methanocaldococcus, Methanosphaera, Methanobrevibacter, Methanospirillum and Methanosarcina.

[0039] In particular, the host strain and, thus, host cell for use in a method of the invention may be selected from the group of Escherichia coli, Azotobacter vinelandii, Klebsiella pneumoniae, Anabaena sp., Synechocystis sp., Microcystis aeruginosa, Deinococcus radiourans, Deinococcus geothermalis, Thermus thermophilus, Bacillus subtilis, Bacillus amyloliquefaciens, Bacillus methanolicus, Corynebacterium glutamicum, Aspergillus niger, Penicillium chrysogenum, Penicillium notatum, Paecilomyces carneus, Cephalosporium acremonium, Ustilago maydis, Pichia pastoris, Saccharomyces cerevisiae, Kluyveromyces lactis, Candida maltosa, Yarrowia lipolytica, Hansenula polymorpha, Sulfolobus solfataricus, Methanobacterium thermoautothrophicum, Methanococcus maripaludis, Methanocaldococcus jannashii, Methanosphaera stadtmanae, Methanococcus voltae, Methanosarcina acetivorans, Methanosarcina barkeri, Methanosarcina mazei, Methanosarcina acetivorans, Methanospirillum hungatei, Methanosaeta thermophila Methanobrevibacter Methanococcus vannielii and Methanococcus aeolicus host cells

[0040] It is considered advantageous that the host cell is an organism naturally capable of converting 5-FVA to adipate or at least capable of catalysing at least one of the necessary reactions.

[0041] In a specific embodiment, the enzyme having catalytic activity with respect to the conversion of 5-formylpentanoic acid into adipic acid comprises a sequence represented by Sequence ID NO: 285, Sequence ID NO: 287 or a homologue thereof. Such enzyme is for instance encoded by a gene comprising the sequence shown in Sequence ID NO: 284 respectively Sequence ID NO: 286. The skilled person will be able to construe functional analogues of these sequences, which may be used as an alternative, based on common general knowledge.

[0042] Advantageously, the host cell is an organism comprising a biocatalyst catalysing the amino adipate pathway for lysine biosynthesis (also termed AAA pathway) or a part thereof (such as lower eukaryotes: fungi, yeasts, euglenoids; certain bacteria, e.g. Thermus, Deinococcus; Archaea) or comprising a biocatalyst for nitrogen fixation via a nitrogenase.

[0043] In a preferred embodiment, the host cell is an organism with a high flux through the AAA pathway, such as Penicillium chrysogenum, Ustilago maydis or an organism adapted, preferably optimised, for lysine production. A high flux is defined as at least 20%, more preferred at least 50%, even more preferred at least 70%, most preferred at least 100% of the rate required to supply lysine for biosynthesis of cellular protein in the respective organism under the chosen production conditions.

[0044] In a preferred embodiment, the host cell is an organism with high levels of homocitrate being produced, which may be a naturally occurring or a heterologous organism. Such an organism may be obtained by expressing a homocitrate synthase required for formation of the essential cofactor found in nitrogenases or a homologue thereof.

[0045] In an embodiment, the host cell comprises a heterologous nucleic acid sequence originating from an animal, in particular from a part thereof—e.g. liver, pancreas, brain, kidney, heart or other organ. The animal may in particular be selected from the group of mammals, more in particular selected from the group of Leporidae, Muridae, Suidae and Bovidae.

[0046] In an embodiment, the host cell comprises a heterologous nucleic acid sequence originating from a plant. Suitable plants in particular include plants selected from the group of Asplenium; Cucurbitaceae, in particular Curcurbita, e.g. Curcurbita moschata (squash), or Cucumis; Brassicaceae, in particular Arabidopsis, e.g. A. thaliana; Mercurialis, e.g. Mercurialis perennis; Hydnocarpus; and Ceratonia.

[0047] In an embodiment, the host cell comprises a heterologous nucleic acid sequence originating from a bacterium. Suitable bacteria may in particular be selected amongst the group of Vibrio, Pseudomonas, Bacillus, Corynebacterium, Brevibacterium, Enterococcus, Streptococcus, Actinomycetales, Klebsiella, Lactococcus, Lactobacillus, Clostridium, Escherichia, Klebsiella, Anabaena, Microcystis, Synechocystis, Rhizobium, Bradyrhizobium, Thermus, Mycobacterium, Zymomonas, Proteus, Agrobacterium, Geobacillus, Acinetobacter, Azotobacter, Ralstonia, Rhodobacter, Paracoccus, Novosphingobium, Nitrosomonas, Legionella, Neisseria, Rhodopseudomonas, Staphylococcus, Deinococcus and Salmonella.

[0048] In an embodiment, the host cell comprises a heterologous nucleic acid sequence originating from an archaea. Suitable archaea may in particular be selected amongst the group of Archaeoglobus, Aeropyrum, Halobacterium, Methanosarcina, Methanococcus, Thermoplasma, Thermococcus, Pyrobaculum, Pyrococcus, Sulfolobus, Methanococcus, Methanosphaera, Methanopyrus, Methanobrevibacter, Methanoca/dococcus and Methanobacterium.

[0049] In an embodiment, the host cell comprises a heterologous nucleic acid sequence originating from a fungus. Suitable fungi may in particular be selected amongst the group of Rhizopus, Phanerochaete, Emericella, Ustilago, Neurospora, Penicillium, Cephalosporium, Paecilomyces, Trichophytum and Aspergillus.

[0050] In an embodiment, the host cell comprises a heterologous nucleic acid sequence originating from a yeast. A suitable yeast may in particular be selected amongst the group of Candida, Hansenula, Kluyveromyces, Yarrowia, Schizosaccharomyces, Pichia, Yarrowia and Saccharomyces.

[0051] It will be clear to the person skilled in the art that use can be made of a biocatalyst wherein a naturally occurring biocatalytic moiety (such as an enzyme) is expressed (wild type) or a mutant of a naturally occurring biocatalytic moiety with suitable activity in a method according to the invention. Properties of a naturally occurring biocatalytic moiety may be improved by biological techniques known to the skilled person, e.g. by molecular evolution or rational design. Mutants of wild-type biocatalytic moieties can for example be made by modifying the encoding DNA of an organism capable of producing a biocatalytic moiety (such as an enzyme) using mutagenesis techniques known to the person skilled in the art. These include random mutagenesis, site-directed mutagenesis, directed evolution, and gene recombination. In particular the DNA may be modified such that it encodes an enzyme that differs by at least one amino acid from the wild-type enzyme, so that it encodes an enzyme that comprises one or more amino acid substitutions, deletions and/or insertions compared to the wild-type, or such that the mutants combine sequences of two or more parent enzymes or by effecting the expression of the thus modified DNA in a suitable (host) cell. The latter may be achieved by methods known to the skilled person such as codon optimisation or codon pair optimisation, e.g. based on a method as described in WO 2008/000632.

[0052] A mutant biocatalyst may have improved properties, for instance with respect to one or more of the following aspects: selectivity towards the substrate, activity, stability, solvent tolerance, pH profile, temperature profile, substrate profile, susceptibility to inhibition, cofactor utilisation and substrate-affinity. Mutants with improved properties can be identified by applying e.g. suitable high through-put screening or selection methods based on such methods known to the skilled person in the art.

[0053] In accordance with the invention, AKP is prepared from AKG. The AKG may in principle be obtained in any way. In particular, AKG may be obtained biocatalytically by providing the heterologous biocatalyst with a suitable carbon source that can be converted into AKG, for instance by fermentation of the carbon source. In an advantageous method AKG is prepared making use of a whole cell biotransformation of the carbon source to form AKG.

[0054] The carbon source may in particular contain at least one compound selected from the group of monohydric alcohols, polyhydric alcohols, carboxylic acids, carbon dioxide, fatty acids, glycerides, including mixtures comprising any of said compounds. Suitable monohydric alcohols include methanol and ethanol, Suitable polyols include glycerol and carbohydrates. Suitable fatty acids or glycerides may in particular be provided in the form of an edible oil, preferably of plant origin.

[0055] In particular a carbohydrate may be used, because usually carbohydrates can be obtained in large amounts from a biologically renewable source, such as an agricultural product, preferably an agricultural waste-material. Preferably a carbohydrate is used selected from the group of glucose, fructose, sucrose, lactose, saccharose, starch, cellulose and hemi-cellulose. Particularly preferred are glucose, oligosaccharides comprising glucose and polysaccharides comprising glucose.

[0056] In an embodiment of the invention AKG is converted into AKA using a biocatalyst for the conversion of AKG into AKA, part of said biocatalyst originating from the AAA pathway for lysine biosynthesis. Such conversion may involve a single or a plurality of reaction steps, which steps may be catalysed by one or more biocatalysts.

[0057] The biocatalyst for catalysing the conversion of AKG into AKA or parts thereof may be homologous or heterologous. In particular, the biocatalyst forming part of the AAA pathway for lysine biosynthesis may be found in an organism selected from the group of yeasts, fungi, archaea and bacteria, in particular from the group of Penicillium, Cephalosporium, Paecilomyces, Trichophytum, Aspergillus, Phanerochaete, Emericella, Ustilago, Schizosaccharomyces, Saccharomyces, Candida, Kluyveromyces, Yarrowia, Pichia, Hansenula, Thermus, Deinococcus, Pyrococcus, Sulfolobus, Thermococcus, Methanococcus, Methanosarcina, Methanocaldococcus, Methanosphaera, Methanopyrus, Methanobrevibacter, Methanospirillum and Methanothermobacter. A suitable biocatalyst may be found in an organism able to produce homocitrate, e.g. a biocatalyst for the nitrogenase complex in nitrogen fixing bacteria such as cyanobacteria (e.g. Anabaena, Microcystis, Synechocystis) Rhizobiales (e.g. Rhizobium, Bradyrhizobium), γ-proteobacteria (e.g. Pseudomonas, Azotobacter, Klebsiella) and actinobacteria (e.g. Frankia). Thus, if a biocatalyst is used based on a host cell naturally comprising the AAA pathway for lysine biosynthesis or parts thereof, this system may be homologous.

[0058] In a preferred embodiment of the invention a high productivity of AKA by the biocatalyst is desired. A biocatalyst containing the AAA pathway for lysine biosynthesis or parts thereof may be modified by methods known in the art such as mutation/screening or metabolic engineering to this effect. A high level of AKA can be generated by increasing the activity of enzymes involved in its formation and/or decreasing the activity involved in its conversion to e.g. amino adipate.

[0059] Enzymes involved in formation of AKA include homocitrate synthase (EC 2.3.3.14), homo aconitase (EC 4.2.1.36), and homoisocitrate dehydrogenase (EC 1.1.1.87). The activity for these enzymes in the host cell can be increased by methods known in the art such as (over-) expression of genes encoding the respective enzyme and/or functional homologues, alleviating inhibitions by substrates, products or other compounds, or improving catalytic properties of the enzymes by molecular evolution or rational design. A preferred method to perform directed evolution may be based on WO 2003/010183.

[0060] As it is undesired that the AKA that is produced is converted to aminoadipate (AAA)—which would be a further step in the pathway for lysine biosynthesis)—it is preferred that the heterologous biocatalyst has low or no activity of an enzyme catalysing this conversion, in particular an aminotransferase, such as aminoadipate aminotransferase (EC 2.6.1.39) or amino acid dehydrogenase capable of catalysing this conversion. Thus, in case the host cell providing the biocatalyst comprises a gene encoding such an enzyme, such gene is preferably inactivated, knocked out, or the expression of such gene is reduced. As this step is essential in the AAA pathway for lysine production a host cell which has limited, minimal activity to supply the required amount of lysine for growth and maintenance but is not capable of high level conversions of AKA to AAA is advantageous. In particular in case Penicillium chrysogenum is the host, the aminotransferase may have the sequence of Sequence ID 68, or a homologue thereof.

[0061] Inactivation of a gene encoding an undesired activity may be accomplished, by several methods. One approach is a temporary one using an anti-sense molecule or RNAi molecule (e.g. based on Kamath et al. 2003. Nature 421:231-237). Another is using a regulatable promoter system, which can be switched off using external triggers like tetracycline (e.g. based on Park and Morschhauser, 2005, Eukaryot. Cell. 4:1328-1342). Yet another one is to apply a chemical inhibitor or a protein inhibitor or a physical inhibitor (e.g. based on Tour et al. 2003. Nat Biotech 21:1505-1508). A much preferred method is to remove the complete gene(s) or a part thereof, encoding the undesired activity. To obtain such a mutant one can apply state of the art methods like Single Cross-Over Recombination or Double Homologous Recombination. For this, one needs to construct an integrative cloning vector that may integrate at the predetermined target locus in the chromosome of the host cell. In a preferred embodiment of the invention, the integrative cloning vector comprises a DNA fragment, which is homologous to a DNA sequence in a predetermined target locus in the genome of host cell for targeting the integration of the cloning vector to this predetermined locus. In order to promote targeted integration, the cloning vector is preferably linearized prior to transformation of the host cell. Linearization is preferably performed such that at least one but preferably either end of the cloning vector is flanked by sequences homologous to the target locus. The length of the homologous sequences flanking the target locus is preferably at least 0.1 kb, even preferably at least 0.2 kb, more preferably at least 0.5 kb, even more preferably at least 1 kb, most preferably at least 2 kb. The length that finally is best suitable in an experiment depends on the organism, the sequence and length of the target DNA.

[0062] The efficiency of targeted integration of a nucleic acid construct into the genome of the host cell by homologous recombination, i.e. integration in a predetermined target locus, is preferably increased by augmented homologous recombination abilities of the host cell. Such phenotype of the cell preferably involves a deficient hdfA or hdfB gene as described in WO 05/95624. WO 05/95624 discloses a preferred method to obtain a filamentous fungal cell comprising increased efficiency of targeted integration by preventing non-homologous random integration of DNA fragments into the genome. The vector system may be a single vector or plasmid or two or more vectors or plasmids, which together contain the total DNA to be introduced into the genome of the host cell.

[0063] Fungal cells may be transformed by protoplast formation, protoplast transformation, and regeneration of the cell wall. Suitable procedures for transformation of fungal host cells are described in EP 238023 and Yelton et al. (1984. Proc. Nat. Acad. Sci. USA 81:1470-1474). Suitable procedures for transformation of filamentous fungal host cells using Agrobacterium tumefaciens are described by de Groot M. J. et al. (1998. Nat. Biotechnol. 16:839-842. Erratum in: Nat. Biotechnol. 1998. 16:1074). Other methods like electroporation, described for Neurospora crassa, may also be applied.

[0064] Fungal cells are transfected using co-transformation, i.e. along with gene(s) of interest also a selectable marker gene is transformed. This can be either physically linked to the gene of interest (i.e. on a plasmid) or on a separate fragment. Following transfection transformants are screened for the presence of this selection marker gene and subsequently analyzed for the integration at the preferred predetermined genomic locus. A selectable marker is a product, which provides resistance against a biocide or virus, resistance to heavy metals, prototrophy to auxotrophs and the like. Useful selectable markers include, but are not limited to, amdS (acetamidase), argB (ornithinecarbamoyltransferase), bar (phosphinothricinacetyl-transferase), hygB (hygromycin phosphotransferase), niaD (nitrate reductase), pyrG (orotidine-5′-phosphate decarboxylase), sC or sutB (sulfate adenyltransferase), trpC (anthranilate synthase), ble (phleomycin resistance protein), as well as equivalents thereof. The most preferred situation is providing a DNA molecule comprising a first DNA fragment comprising a desired replacement sequence (i.e. the selection marker gene) flanked at its 5′ and 3′ sides by DNA sequences substantially homologous to sequences of the chromosomal DNA flanking the target sequence. Cells wherein the target sequence in the chromosomal DNA sequence is replaced by the desired replacement sequence can be selected by the presence of the selectable marker of the first DNA fragment. To increase the relative frequency of selecting the correct mutant microbial strain, a second DNA fragment comprising an expression cassette comprising a gene encoding a selection marker and regulatory sequences functional in the eukaryotic cell can be operably linked to the above described fragment (i.e. 5′-flank of target locus+selection marker gene+3′-flank of target locus) and cells wherein the target sequence in the chromosomal DNA sequence is replaced by the desired replacement sequence can be selected by the presence of the selectable marker of the first DNA fragment and the absence of the second selection marker gene.

[0065] In case the enzyme system forming part of the amino adipate pathway for lysine biosynthesis is heterologous to the host cell, it is preferred that no genes are included into the host cell that encode an enzyme catalysing the conversion of ketoadipate into aminoadipate. The term ‘enzyme system’ is in particular used herein for a single enzyme or a group of enzymes whereby a specific conversion can be catalysed. Said conversion may comprise one or more chemical reactions with known or unknown intermediates e.g. the conversion of AKG into AKA or the conversion of AKA into AKP. Such system may be present inside a cell or isolated from a cell. It is known that aminotransferases often have a wide substrate range. It may be desired to decrease activity of one or more such enzymes present in a host cell such that activity in the conversion of AKA to AAA is reduced, whilst maintaining relevant catalytic functions for biosynthesis of other amino acids or cellular components. Also a host cell devoid of any other enzymatic activity resulting in the conversion of AKA to an undesired side product is preferred.

[0066] In a further embodiment, AKG is converted into AKA, making use of at least one heterologous biocatalyst catalysing the C₁-elongation of AKG into AKA. One or more biocatalysts may be used. Said biocatalyst or biocatalysts may comprise one or enzymes originating from one or more source organisms (e.g. comprise more than one enzyme originating from different source organisms). A suitable biocatalyst for preparing AKA from AKG may in particular be selected amongst biocatalysts catalysing C₁-elongation of alpha-ketoglutaric acid into alpha-ketoadipic acid and/or C₁-elongation of alpha-ketoadipic acid into alpha-ketopimelic acid.

[0067] AKA prepared from AKG may thereafter be converted into AKP, making use of at least one heterologous biocatalyst catalysing the elongation of AKA into AKP. These biocatalysts may be the same as or different from the biocatalysts catalysing the conversion of AKG into AKA by C₁-elongation. One or more than one biocatalyst may be used for conversion of AKA to AKP. Said biocatalyst(s) may comprise one or more enzymes originating from one or more source organisms (e.g. comprise more than one enzyme originating from different source organisms).

[0068] A biosynthetic pathway making use of C₁-elongation is known to exist in methanogenic Archaea as part of coenzyme B biosynthesis and part of biotin biosynthesis. Coenzyme B is considered essential for methanogenesis in these organisms and alpha-ketosuberate is an important intermediate in coenzyme B biosynthesis. In such methanogenic Archaea alpha-ketoglutaric acid is converted to alpha-ketoadipic acid, then alpha-ketopimelic acid and finally alpha-ketosuberic acid by successive addition of methylene groups following a plurality of reaction steps (see also FIG. 1):
[0069] a. alpha-keto-acid of length Cₙ+acetyl-CoA→homoₙcitrate+CoA-SH (steps 1, 5 and 9 in FIG. 1)
[0070] b. homoₙ-citrate← →homoₙ-aconitate (catalyzed by homoₙ-citrate dehydratase (steps 2, 6 and 10 in FIG. 1)
[0071] c. homoₙaconitate← →isohomoₙ-citrate (steps 3, 7 and 11) in FIG. 1)
[0072] d. homoₙ-isocitrate+NADP⁺→alpha-keto-acid of length Cₙ₊₁+NADPH+H⁺+CO₂ (steps 4, 8 and 12 in FIG. 1)
   wherein n is selected from 1-4.

[0073] This repetitive reaction sequence has been described for the methanogens Methanosarcina thermophila and Methanocaldococcus jannashii. Similar non-iterative reactions are involved in C₁-extension of other α-ketocarboxylic acids in other metabolic pathways such as the conversion of oxaloacetate to α-ketoglutarate in the oxidative citrate cycle, conversion of alpha-isovalerate to α-isocaproate as part in the isopropylmalate pathway to leucine, conversion of alpha-ketoglutarate to α-ketoadipate in the AAA pathway to lysine, conversion of pyruvate to alpha-ketobutyrate in the pyruvate pathway to isoleucine, and in the conversion of maleate to pyruvate. Collectively these reactions are defined as “C₁-elongation”.

[0074] Several genes and enzymes involved in C₁-elongations have been described and characterised from M. jannashii. It was shown that these enzymes and the encoding genes are similar to each other and to other enzymes and their encoding genes involved in C₁-elongations in other organisms. A subset of enzymes for the iterative elongation of alpha-ketoglutarate to α-ketosuberate via alpha-ketoadipate and alpha-ketopimelate has been characterised biochemically and was called “Aks”. Some of the genes encoding these enzymes have been identified in the genome sequence of M. jannashii and others have been proposed.

[0075] The inventors have realised that C₁-elongation can be used to prepare AKA or AKP on an industrial scale, such that AKA or AKP can be made available as an intermediate for the preparation of adipic acid by incorporating one or more nucleic acid sequences encoding an enzyme system involved in C₁ elongation into a suitable host cell.

[0076] The enzyme system for catalysing C₁ elongation thereby forming AKA or AKP may in particular comprise one or more enzymes selected from the group of homoₙ-citrate synthases, homoₙ-aconitases and iso-homoₙ-citrate dehydrogenases, wherein n is selected from 1-4.

[0077] A homoₙ-citrate synthase may in particular catalyse “reaction a” of the C₁-elongation. A homoₙ-citrate synthase is defined as an enzyme capable of condensing an alpha -keto carboxylic diacid of chain length C₄₊ₙ with acetyl-CoA resulting in formation of homoₙ-citrate wherein n is selected from 1-4. The homoₙ-citrate synthase may in particular be an enzyme that is or can be classified in EC 2.3.3. More in particular, a suitable homoₙ-citrate synthase may be selected amongst homocitrate synthases (EC 2.3.3.14), or may be classified in EC 2.3.3.1, 2.3.3.2, 2.3.3.4 or 2.3.3.9. Particularly preferred is AksA or a homologue thereof having homo(ₙ)citrate activity.

[0078] A homoₙ-aconitase may in particular catalyse “reaction b” and/or “reaction c” of the C₁-elongation. A homoₙ-aconitase is defined as an enzyme capable of converting homoₙ-citrate to iso-homoₙ-citrate via a homoₙ-aconitate intermediate or at least one of the reversible half reactions (i.e. homoₙ-aconitate to homoₙ-citrate or homoₙ-aconitate to iso-homoₙ-citrate) wherein n is selected from 1-4. The homoₙ-aconitase may in particular be an enzyme that is or can be classified in EC 4.2.1. More in particular, a suitable homoₙ-aconitase may be selected amongst homoaconitase (EC 4.2.1.36), or may be classified in EC 4.2.1.3, 4.2.1.33, 4.2.1.79 and 4.2.1.99. Particularly preferred is an enzyme selected from the group of AksD, AksE, homologues of AksD and homologues of AksE having homoₙ-aconitase activity.

[0079] A homoₙ-isocitrate dehydrogenase may in particular catalyse “reaction d” of the C₁-elongation. A iso-homoₙ-citrate dehydrogenase is defined as an enzyme capable of converting iso-homoₙ-citrate to an α-keto-carboxylic-diacid of chain length C₅₊ₙ wherein n is selected from 1-4 and thereby releasing CO₂. The iso-homoₙ-citrate dehydrogenase may in particular be an enzyme that is or can be classified in EC 1.1.1. More in particular, a suitable iso-homoₙ-citrate dehydrogenase may be selected amongst iso-homocitrate dehydrogenase (EC 1.1.1.87), or may be classified in EC 1.1.136, 1.1.137, 1.1.1.38,1.1.139,1.1.1.40,1.1.1.41, 1.1.1.42,1.1.1.82, 1.1.1.83, 1.1.1.84, 1.1.1.85 and 1.1.1.286. Particularly preferred is AksF or a homologue thereof having homoₙ-isocitrate dehydrogenase activity.

[0080] Methanogens may serve as biocatalysts for production of AKP or can be used as a source for such biocatalysts. Suitable biocatalysts may be identified by searching for protein and nucleotide sequences similar to known enzymes from C₁-elongations pathways. Similar sequences can efficiently be identified in sequence databases using bioinformatic techniques well known in the art. Molecular biology methods known in the art such as Southern hybridization or PCR techniques employing degenerate oligonucleotides can be used to identify similar genes in cultured organisms and environmental samples. After cloning and sequencing such biocatalysts may be utilized for AKP production in a heterologous host.

[0081] In particular, one or more enzymes for catalysing C₁ elongation may be used from a methanogen selected from the group of Methanococcus, Methanospirillum, Methanocaldococcus, Methanosarcina, Methanothermobacter, Methanosphaera, Methanopyrus and Methanobrevibacter. More specifically one or more enzymes may be used from a methanogen selected from the group of Methanothermobacter thermoautotropicum, Methanococcus maripaludis, Methanosphaera stadtmanae, Methanopyrus kandleri, Methanosarcina thermophila, Methanobrevibacter smithii, Methanococcus vannielii, Methanospirillum hungatei, Methanosaeta thermophila Methanosarcina acetivorans and Methanococcus aeolicus.

[0082] Further, suitable enzymes for catalysing C₁ elongation of AKG and/or AKA may e.g. be found in organisms comprising an enzyme system for catalysing lysine biosynthesis via the aminoadipate pathway or parts thereof or contain homologues thereof as part of other metabolism such as e.g. homocitrate synthase involved in nitrogen fixation. In particular organisms selected from the group of yeasts and fungi, such as Penicillium, Cephalosporium, Aspergillus, Phanerochaete, Emericella, Ustilago, Paecilomyces, Trichophytum, Yarrowia, Hansenula, Schizosaccharomyces, Saccharomyces, Candida, Kluyveromyces, in particular Penicillium chrysogenum, Penicillium notatum, Paecilomyces carneus, Paecilomyces persinicus, Cephalosporium acremonium, Aspergillus niger, Emericella nidulans, Aspergillys oryzae, Ustilago maydis, Schizosaccharomyces pombe, Saccharomyces cerevisiae, Yarrowia lipolytica, Hansenula polymorpha, Candida albicans, Candida maltosa, and Kluyveromyces lactis; bacteria, such as Azotobacter, Pseudomonas, Klebsiella, Deinococcus, Thermus, in particular Azotobacter vinelandii, Pseudomonas stutzerii, Klebsiella pneumoniae, Deinococcus radiourans, Deinococcus geothermalis, Thermus thermophilus; and archae, such as Pyrococcus, Sulfolobus, Thermococcus, Methanococcus, Methanocaldococcus, Methanosphaera, Methanopyrus, Methanospirillum, Methanobrevibacter, Methanosarcina and Methanothermobacter, in particular Pyrococcus horikoshii, Sulfolobus solfataricus, Thermococcus kodakarensis, Methanococcus maripaludis, Methanococcus aeolicus, Methanococcus vannielii, Methanocaldococcus jannashii, Methanosphaera stadtmanae, Methanopyrus kandleri, Methanobrevibacter smithii, Methanosarcina thermophilus, Methanospirillum hungatei, Methanosaeta thermophila, Methanosarcina acetivorans and Methanothermobacter thermoautotrophicum. Such yeast, fungus, bacterium, archaeon or other organism may in particular provide a homocitrate synthase capable of catalysing “reaction a” in the elongation of AKG to AKA and optionally the elongation of AKA to APK.

[0083] Further, suitable biocatalysts for catalysing a reaction step in the preparation of AKP may be found in Asplenium or Hydnocarpus, in particular Asplenium septentrionale or Hydnocarpus anthelminthica, which naturally are capable of producing AKP.

[0084] In a preferred method one or more enzymes selected from the group of Aks enzymes and homologues thereof, in particular from the group of AksA, AksD, AksE, AksF and homologues thereof are used. Examples of homologues for these Aks enzymes and the genes encoding these enzymes are given in the Tables on the following pages.

| | Enzyme | | | |
|---|---|---|---|---|
| Step | name | Organism | gene | Protein |
| 1 | AksA | Methanocaldococcus jannashii | MJ0503 | NP_247479 |
| | | Methanothermobacter thermoautotropicum ΔH | MTH1630 | NP_276742 |
| | | Methanococcus maripaludis S2 | MMP0153 | NP_987273 |
| | | Methanococcus maripaludis C5 | MmarC5_1522 | YP_001098033 |
| | | Methanococcus maripaludis C7 | MmarC7_1153 | YP_001330370 |
| | | Methanospaera stadtmanae DSM 3091 | Msp_0199 | YP_447259 |
| | | Methanopyrus kandleri AV19 | MK1209 | NP_614492 |
| | | Methanobrevibacter smithii ATCC35061 | Msm_0722 | YP_001273295 |
| | | Methanococcus vannielii SB | Mevan_1158 | YP_001323668 |
| | | Klebsiella pneumoniae | nifV | P05345 |
| | | Azotobacter vinelandii | nifV | P05342 |
| | | Pseudomonas stutzerii | nifV | ABP79047 |
| | | Methanococcus aeolicus Nankai 3 | Maeo_0994 | YP_001325184 |
| 2, 3 | AksD | Methanocaldococcus jannashii | MJ1003 | NP_247997 |
| | | Methanothermobacter thermoautotropicum ΔH | MTH1386 | NP_276502 |
| | | Methanococcus maripaludis S2 | Mmp1480 | NP_988600 |
| | | Methanococcus maripaludis C5 | MmarC5_0098 | YP_001096630 |
| | | Methanococcus maripaludis C7 | MmarC7_0724 | YP_001329942 |
| | | Methanospaera stadtmanae DSM 3091 | Msp_1486 | YP_448499 |
| | | Methanopyrus kandleri AV19 | MK1440 | NP_614723 |
| | | Methanobrevibacter smithii ATCC35061 | Msm_0723 | YP_001273296 |
| | | Methanococcus vannielii SB | Mevan_0789 | YP_001323307 |
| | | Methanococcus aeolicus Nankai 3 | Maeo_0311 | YP_001324511 |
| | | Methanosarcina acetivorans | MA3085* | NP_617978* |
| | | Methanospirillum hungatei JF-1 | Mhun_1800* | YP_503240* |
| | | Methanosaeta thermophila PT | Mthe_0788* | YP_843217* |
| | | Methanosphaera stadtmanae DSM 3091 | Msp_1100* | YP_448126* |

References to gene and protein can be found via www.ncbi.nlm.nih.gov/(for listed gene/protein marked with an * as available on 2 Mar. 2010, for the others: as available on 15 Apr. 2008).

| | Enzyme | | | |
|---|---|---|---|---|
| Step | name | Orgamism | gene | Protein |
| 2, 3 | AksE | Methanocaldococcus jannashii | MJ1271 | NP_248267 |
| | | Methanothermobacter thermoautotropicum ΔH | MTH1387 | NP_276503 |
| | | Methanococcus maripaludis S2 | MMP0381 | NP_987501 |
| | | Methanococcus maripaludis C5 | MmarC5_1257 | YP_001097769 |
| | | Methanococcus maripaludis C7 | MmarC7_1379 | YP_001330593 |
| | | Methanospaera stadtmanae DSM 3091 | Msp_1485 | YP_448498 |
| | | Methanopyrus kandleri AV19 | MK0781 | NP_614065 |
| | | Methanobrevibacter smithii ATCC35061 | Msm_0847 | YP_001273420 |
| | | Methanococcus vannielii SB | Mevan_1368 | YP_001323877 |
| | | Methanococcus aeolicus Nankai 3 | Maeo_0652 | YP_001324848 |
| | | Methanosarcina acetivorans | MA3751* | NP_618624* |
| | | Methanospirillum hungatei JF-1 | Mhun_1799* | YP_503239* |
| | | Methanosphaera stadtmanae DSM 3091 | Msp_0374* | YP_447420* |
| | | Methanosaeta thermophila PT | Mthe_0853* | YP_843282* |
| 4 | AksF | Methanocaldococcus jannashii | MJ1596 | NP_248605 |
| | | Methanothermobacter thermoautotropicum ΔH | MTH184 | NP_275327 |
| | | Methanococcus maripaludis S2 | MMP0880 | NP988000 |
| | | Methanococcus maripaludis C5 | MmarC5_0688 | YP001097214 |
| | | Methanococcus maripaludis C7 | MmarC7_0128 | YP_001329349 |
| | | Methanospaera stadtmanae DSM 3091 | Msp_0674 | YP_447715 |
| | | Methanopyrus kandleri AV19 | MK0782 | NP_614066 |
| | | Methanobrevibacter smithii ATCC35061 | Msm_0373 | YP001272946 |
| | | Methanococcus vannielii SB | Mevan_0040 | YP_001322567 |
| | | Methanococcus aeolicus Nankai 3 | Maeo_1484 | YP_001325672 |
| | | Methanosarcina acetivorans | MA3748* | NP_618621* |
| | | Methanospirillum hungatei JF-1 | Mhun_1797* | YP_503237* |
| | | Methanosphaera stadtmanae DSM 3091 | Msp_0674* | YP_447715* |
| | | Methanosaeta thermophila PT | Mthe_0855* | YP_843284* |
| | | Methanobrevibacter smithii ATCC 35061 | Msm_1298* | YP_001273871* |

References to gene and protein can be found via www.ncbi.nlm.nih.gov/((for listed gene/protein marked with an * as available on 2 Mar. 2010, for the others: as available on 15 Apr. 2008).

[0085] In particular an enzyme may be used represented by any of the sequence ID's 4,5,6,7,8,9,10,11,12,13, 261,264,267, 273,276,279,282 (AksA), 14,15,16,17,18,19,20,21,22,23,186,189,192,195,225,228,231,234 (AksD), 24,25,26,27,28,29,30,31,32,33,198,201,204,207,237,240,243,246 (AksE), 34,35,36,37,38,39,40,41,42,43,210,213,216,219,222,249,252,255,258 (AksF), 44,45,46,47,48,49,50,51,52,53 (AksA homologues), 54,55,56,57,58,59,60,61 (AksD homologues), 62,63,64,65,66,67 (AksF homologues), 69,70,71,72,73,74,75,76,77, 270 (AksA homologues.

[0086] The inventors have realised that AKP can be converted into 5-FVA by decarboxylation.

[0087] In a specific embodiment, AKP is biocatalytically converted into 5-FVA in the presence of a decarboxylase or other biocatalyst catalysing such conversion.

[0088] In a preferred method AKP is converted into 5-FVA in the presence of a biocatalyst capable of catalysing the decarboxylation of an alpha-keto acid . An enzyme having such catalytic activity may therefore be referred to as an alpha-keto acid decarboxylase.

[0089] Said acid preferably is a diacid, wherein the said biocatalyst is selective towards the acid group next to the keto-group. In general, a suitable decarboxylase has alpha-ketopimelate decarboxylase activity, capable of catalysing the conversion of AKP into 5-FVA.

[0090] The enzyme capable of decarboxylating an alpha-keto acid may in particular be selected from the group of decarboxylases (E.C. 4.1.1), preferably from the group of branched chain alpha-keto acid decarboxylases, alpha-ketoisovalerate decarboxylases (EC 1.2.4.4), alpha-ketoglutarate decarboxylases (EC 4.1.1.71), and pyruvate decarboxylases (EC 4.1.1.1).

[0091] One or more other suitable decarboxylases may in particular be selected amongst the group of oxalate decarboxylases (EC 4.1.1.2), oxaloacetate decarboxylases (EC 4.1.1.3), acetoacetate decarboxylases (EC 4.1.1.4), valine decarboxylases/leucine decarboxylases (EC 4.1.1.14), 3-hydroxyglutamate decarboxylases (EC 4.1.1.16), 2-oxoglutarate decarboxylases (EC 4.1.1.71), and diaminobutyrate decarboxylases (EC 4.1.1.86).

[0092] A decarboxylase may in particular be a decarboxylase of an organism selected from the group of squashes; cucumbers; yeasts; fungi, e.g. Saccharomyces cerevisiae, Candida flareri, Hansenula sp., Kluyveromyces marxianus, Rhizopus javanicus, Zymomonas mobilis, more in particular mutant 1472A from Zymomonas mobilis, and Neurospora crassa; mammals, in particular from mammalian brain; and bacteria. An oxaloacetate decarboxylase from Pseudomonas may in particular be used.

[0093] A decarboxylase used in accordance with the invention may in particular be selected from the group of alpha-keto acid decarboxylases from Lactococcus lactis, Lactococcus lactis var. maltigenes or Lactococcus lactis subsp. cremoris; branched chain alpha-keto acid decarboxylases from Lactococcus lactis strain B1157 or Lactococcus lactis IFPL730; pyruvate decarboxylases from Saccharomyces cerevisiae, Candida flareri, Zymomonas mobilis, Hansenula sp., Rhizopus javanicus, Neurospora crassa, or Kluyveromyces marxianus; αλπηα-ketoglutarate decarboxylases from Mycobacterium tuberculosis; glutamate decarboxylases from E. coli, Lactobacillus brevis, Mycobacterium leprae, Neurospora crassa or Clostridium perfringens; and aspartate decarboxylases from E. coli.

[0094] In a specific embodiment, AKP is chemically converted into

[0095] 5-FVA. Efficient chemical decarboxylation of 2-keto carboxylic acid into the corresponding aldehyde can be performed by intermediate enamine formation using a secondary amine, for instance morpholine, under azeotropic water removal and simultaneous loss of CO₂, e.g. based on a method as described in Tetrahedron Lett. 1982, 23(4), 459-462. The intermediate terminal enamide is subsequently hydrolysed to the corresponding aldehyde. In principle, 5-FVA—prepared from AKP=—may be converted into adipic acid in any chemical or biocatalytic way. Preferably, the 5-FVA is converted into adipic acid by oxidation of the aldehyde group. This may be accomplished chemically, e.g. by selective chemical oxidation. In a preferred method of the invention, the preparation comprises a biocatalytic reaction in the presence of a biocatalyst capable of catalysing the oxidation of an aldehyde group. The biocatalyst may use NAD or NADP as cofactor.

[0096] An enzyme capable of catalysing the oxidation of an aldehyde group may in particular be selected from the group of oxidoreductases (EC 1.2.1), preferably from the group of aldehyde dehydrogenase (EC 1.2.1.3, EC 1.2.1.4 and EC 1.2.1.5), malonate-semialdehyde dehydrogenase (EC 1.2.1.15), succinate-semialdehyde dehydrogenase (EC 1.2.1.16 and EC 1.2.1.24), acetaldehyde dehydrogenase (acetylating) (EC 1,2,1,10): aspartate-semialdehyde dehydrogenase (EC 1.2.1.11); glutarate-semialdehyde dehydrogenase (EC 1.2.1.20), aminoadipate semialdehyde dehydrogenase (EC 1.2.1.31), adipate semialdehyde dehydrogenase (EC 1.2.1.63). Adipate semialdehyde dehydrogenase activity has been described, for example, in the caprolactam degradation pathway in the KEGG database.

[0097] An aldehyde dehydrogenase may in principle be obtained or derived from any organism. The organism may be prokaryotic or eukaryotic. In particular the organism can be selected from bacteria, archaea, yeasts, fungi, protists, plants and animals (including human).

[0098] In an embodiment the bacterium is selected from the group of Acinetobacter (in particular Acinetobacter baumanii and Acinetobacter sp. NCIMB9871), Azospirillum (in particular Azospirillum brasilense) Ralstonia, Bordetella, Burkholderia, Methylobacterium, Xanthobacter, Sinorhizobium, Rhizobium, Nitrobacter, Brucella (in particular B. melitensis), Pseudomonas, Agrobacterium (in particular Agrobacterium tumefaciens), Bacillus, Listeria, Alcaligenes, Corynebacterium, Escherichia and Flavobacterium.

[0099] In an embodiment the organism is selected from the group of yeasts and fungi, in particular from the group of Aspergillus (in particular A. niger and A. nidulans) and Penicillium (in particular P. chrysogenum).

[0100] In an embodiment, the organism is a plant, in particular Arabidopsis, more in particular A. thaliana.

[0101] In a specific embodiment, the biocatalyst comprises an enzyme represented by Sequence ID 78, 79, 80, 81 or a homologue thereof.

[0102] Reaction conditions in a method of the invention may be chosen depending upon known conditions for the biocatalyst, in particular the enzyme, the information disclosed herein and optionally some routine experimentation.

[0103] In principle, the pH of the reaction medium used may be chosen within wide limits, as long as the biocatalyst is active under the pH conditions. Alkaline, neutral or acidic conditions may be used, depending on the biocatalyst and other factors. In case the method includes the use of a micro-organism, e.g. for expressing an enzyme catalysing a method of the invention, the pH is selected such that the micro-organism is capable of performing its intended function or functions. The pH may in particular be chosen within the range of four pH units below neutral pH and two pH units above neutral pH, i.e. between pH 3 and pH 9 in case of an essentially aqueous system at 25° C. A system is considered aqueous if water is the only solvent or the predominant solvent (>50 wt. %, in particular >90 wt. %, based on total liquids), wherein e.g. a minor amount (<50 wt. %, in particular <10 wt. %, based on total liquids) of alcohol or another solvent may be dissolved (e.g. as a carbon source) in such a concentration that micro-organisms which may be present remain active. In particular in case a yeast and/or a fungus is used, acidic conditions may be preferred, in particular the pH may be in the range of pH 3 to pH 8, based on an essentially aqueous system at 25° C. If desired, the pH may be adjusted using an acid and/or a base or buffered with a suitable combination of an acid and a base.

[0104] In principle, the incubation conditions can be chosen within wide limits as long as the biocatalyst shows sufficient activity and/or growth. This includes aerobic, micro-aerobic, oxygen limited and anaerobic conditions.

[0105] Anaerobic conditions are herein defined as conditions without any oxygen or in which substantially no oxygen is consumed by the biocatalyst, in particular a micro-organism, and usually corresponds to an oxygen consumption of less than 5 mmol/l.h, in particular to an oxygen consumption of less than 2.5 mmol/l.h, or less than 1 mmol/l.h.

[0106] Aerobic conditions are conditions in which a sufficient level of oxygen for unrestricted growth is dissolved in the medium, able to support a rate of oxygen consumption of at least 10 mmol/l.h, more preferably more than 20 mmol/l.h, even more preferably more than 50 mmol/l.h, and most preferably more than 100 mmol/l.h.

[0107] Oxygen-limited conditions are defined as conditions in which the oxygen consumption is limited by the oxygen transfer from the gas to the liquid. The lower limit for oxygen-limited conditions is determined by the upper limit for anaerobic conditions, i.e. usually at least 1 mmol/l.h, and in particular at least 2.5 mmol/l.h, or at least 5 mmol/l.h. The upper limit for oxygen-limited conditions is determined by the lower limit for aerobic conditions, i.e. less than 100 mmol/l.h, less than 50 mmol/l.h, less than 20 mmol/l.h, or less than to 10 mmol/l.h.

[0108] Whether conditions are aerobic, anaerobic or oxygen limited is dependent on the conditions under which the method is carried out, in particular by the amount and composition of ingoing gas flow, the actual mixing/mass transfer properties of the equipment used, the type of micro-organism used and the micro-organism density.

[0109] In a preferred method of the invention, at least the preparation of AKP is carried out under fermentative conditions.

[0110] In principle, the temperature used is not critical, as long as the biocatalyst, in particular the enzyme, shows substantial activity. Generally, the temperature may be at least 0° C., in particular at least 15° C., more in particular at least 20° C. A desired maximum temperature depends upon the biocatalyst. In general such maximum temperature is known in the art, e.g. indicated in a product data sheet in case of a commercially available biocatalyst, or can be determined routinely based on common general knowledge and the information disclosed herein. The temperature is usually 90° C. or less, preferably 70° C. or less, in particular 50° C. or less, more in particular or 40° C. or less.

[0111] In particular if a biocatalytic reaction is performed outside a host organism, a reaction medium comprising an organic solvent may be used in a high concentration (e.g. more than 50%, or more than 90 wt. %), in case an enzyme is used that retains sufficient activity in such a medium.

[0112] A compound prepared in a method of the invention can be recovered from the medium in which it has been prepared. Recovery conditions may be chosen depending upon known conditions for recovery the specific compound, the information disclosed herein and optionally some routine experimentation.

[0113] A heterologous cell comprising one or more enzymes for catalysing a reaction step in a method of the invention can be constructed using molecular biological techniques, which are known in the art per se. For instance, such techniques can be used to provide a vector which comprises one or more genes encoding one or more of said biocatalysts. A vector comprising one or more of such genes can comprise one or more regulatory elements, e.g. one or more promoters, which may be operably linked to a gene encoding an biocatalyst.

[0114] As used herein, the term “operably linked” refers to a linkage of polynucleotide elements (or coding sequences or nucleic acid sequence) in a functional relationship. A nucleic acid sequence is “operably linked” when it is placed into a functional relationship with another nucleic acid sequence. For instance, a promoter or enhancer is operably linked to a coding sequence if it affects the transcription of the coding sequence.

[0115] As used herein, the term “promoter” refers to a nucleic acid fragment that functions to control the transcription of one or more genes, located upstream with respect to the direction of transcription of the transcription initiation site of the gene, and is structurally identified by the presence of a binding site for DNA-dependent RNA polym erase, transcription initiation sites and any other DNA sequences, including, but not limited to transcription factor binding sites, repressor and activator protein binding sites, and any other sequences of nucleotides known to one of skilled in the art to act directly or indirectly to regulate the amount of transcription from the promoter. A “constitutive” promoter is a promoter that is active under most environmental and developmental conditions. An “inducible” promoter is a promoter that is active under environmental or developmental regulation. The term “homologous” when used to indicate the relation between a given (recombinant) nucleic acid or polypeptide molecule and a given host organism or host cell, is understood to mean that in nature the nucleic acid or polypeptide molecule is produced by a host cell or organisms of the same species, preferably of the same variety or strain.

[0116] The promoter that could be used to achieve the expression of the nucleotide sequences coding for an enzyme for use in a method of the invention, in particular an aminotransferase, an amino acid dehydrogenase or a decarboxylase, such as described herein above may be native to the nucleotide sequence coding for the enzyme to be expressed, or may be heterologous to the nucleotide sequence (coding sequence) to which it is operably linked. Preferably, the promoter is homologous, i.e. endogenous to the host cell.

[0117] If a heterologous promoter (to the nucleotide sequence encoding for the enzyme of interest) is used, the heterologous promoter is preferably capable of producing a higher steady state level of the transcript comprising the coding sequence (or is capable of producing more transcript molecules, i.e. mRNA molecules, per unit of time) than is the promoter that is native to the coding sequence. Suitable promoters in this context include both constitutive and inducible natural promoters as well as engineered promoters, which are well known to the person skilled in the art.

[0118] A “strong constitutive promoter” is one which causes mRNAs to be initiated at high frequency compared to a native host cell. Examples of such strong constitutive promoters in Gram-positive micro-organisms include SP01-26, SP01-15, veg, pyc (pyruvate carboxylase promoter), and amyE.

[0119] Examples of inducible promoters in Gram-positive micro-organisms include, the IPTG inducible Pspac promoter, the xylose inducible PxylA promoter.

[0120] Examples of constitutive and inducible promoters in Gram-negative microorganisms include, but are not limited to, tac, tet, trp-tet, lpp, lac, lpp-lac, laclq, T7, T5, T3, gal, trc, ara (P_{BAD}), SP6, λ-P_{R}, and λ-P_{L}.

[0121] Promoters for (filamentous) fungal cells are known in the art and can be, for example, the glucose-6-phosphate dehydrogenase gpdA promoters, protease promoters such as pepA, pepB, pepC, the glucoamylase glaA promoters, amylase amyA, amyB promoters, the catalase catR or catA promoters, glucose oxidase goxC promoter, beta-galactosidase lacA promoter, alpha-glucosidase aglA promoter, translation elongation factor tefA promoter, xylanase promoters such as xlnA, xlnB, xlnC, xlnD, cellulase promoters such as eglA, eglB, cbhA, promoters of transcriptional regulators such as areA, creA, xlnR, pacC, prtT, etc or any other, and can be found among others at the NCBI website (http://www.ncbi.nlm.nih.gov/entrez/

[0122] The invention also relates to a novel heterologous cell which may provide one or more biocatalysts capable of catalysing at least one reaction step in the preparation of adipic acid. The invention also relates to a novel vector comprising one or more genes encoding for one or more enzymes capable of catalysing at least one reaction step in the preparation of adipic acid. One or more suitable genes may in particular be selected amongst genes encoding an enzyme as mentioned herein above, more in particular amongst genes encoding an enzyme catalysing the conversion of 5-FVA into adipic acid. In particular, at least one of such genes is heterologous to the host organism.

[0123] In a particularly advantageous embodiment the heterologous cell or the vector comprises an AksD, an AksE, an AksF and an NifV gene. In a further particularlay advantaeous embodiment the heterologous cell additionally comprises an AksA gene. Preferred AksA, AksD, AksE and AksF genes are from M. jannashii, from S.cerevisiae, from M. Maripaludis, from Methanosarcina acetivorans, from Methanospirillum hungatei or from E. coli. The NifV gene is preferably from Azotobacter vinelandii.

[0124] In a particularly preferred embodiment, the NifV gene comprises a sequence represented by SEQ ID NO: 149, or a functional analogue thereof.

[0125] Regarding the genes selected from the group of AksA, AksD, AksE and AksF genes, preferably, the genome of a cell (used) according to the invention comprises at least one nucleic acid sequence according to any of the sequences selected from the group of SEQ ID NO's 145, 146, 147, 148; SEQ ID NO's 167, 168, 169, 170, 171, 172, 173, 174; SEQ ID NO's 177, 178, 179, 180, 181, 182, 183, 184; SEQ ID NO's 224, 226, 236, 238, 248, 250, 260, 262 ;SEQ ID NO's 227, 229, 239, 241, 251, 253, 263, 265; SEQ ID NO's ;194, 196, 206, 208, 221, 223, 281, 283; SEQ ID NO's ;188, 190, 200, 202, 215, 217, 272, 274 and functional analogues thereof. In a specific embodiment, the cell comprises an an AksA, an AksD, an AksE and an AksF gene selected from the group of sequences. In a further specific embodiment, the cell comprises an NifV gene comprising a sequence represented by SEQ ID NO: 149 or a functional analogue thereof, an AksD, an AksE and an AksF gene selected from the group of sequences.

[0126] In a particularly preferred embodiment, one, two three or each of these genes selected from the group of AksA, AksD, AksE and AksF genes comprise a sequence selected from the sequences represented by SEQ ID NO: 145, 146, 147, 148 respectively (AksA, D, E and F respectively) and functional analogous thereof. In a further particularly preferred embodiment, one, two three or each of these genes comprise a sequence represented by respectively SEQ ID NO: 167,168, 169, 170 respectively (AksA, D, E and F respectively) and functional analogous thereof.

[0127] In a particularly preferred embodiment, one, two three or each of these genes selected from the group of AksA, AksD, AksE and AksF genes comprise a sequence selected from the sequences represented by represented by SEQ ID NO: 260, 224, 236, 248, respectively (AksA, D, E and F respectively) and functional analogous thereof.

[0128] In a particularly preferred embodiment, one, two three or each of these genes selected from the group of AksA, AksD, AksE and AksF genes comprise a sequence selected from the sequences represented by represented by SEQ ID NO: 262, 226, 238, 250, respectively (AksA, D, E and F respectively) and functional analogous thereof.

[0129] In a particularly preferred embodiment, one, two three or each of these genes selected from the group of AksA, AksD, AksE and AksF genes comprise a sequence selected from the sequences represented by represented by SEQ ID NO: 263, 227, 239, 251, respectively (AksA, D, E and F respectively) and functional analogous thereof.

[0130] In a particularly preferred embodiment, one, two three or each of these genes comprise a sequence selected from the sequences represented by represented by SEQ ID NO: 265, 229, 241, 253, respectively (AksA, D, E and F respectively) and functional analogous thereof.

[0131] In a particularly preferred embodiment, one, two, three or each of these genes selected from the group of AksA, AksD, AksE and AksF genes comprise a sequence selected from the sequences represented by represented by SEQ ID NO: 281, 194, 206, 221 respectively (AksA, D, E and F respectively) and functional analogous thereof.

[0132] In a particularly preferred embodiment, one, two three or each of these genes selected from the group of AksA, AksD, AksE and AksF genes comprise a sequence selected from the sequences represented by represented by SEQ ID NO: 283, 196, 208, 223, respectively (AksA, D, E and F respectively) and functional analogous thereof.

[0133] In a particularly preferred embodiment, one, two three or each of these genes selected from the group of AksA, AksD, AksE and AksF genes comprise a sequence selected from the sequences represented by represented by SEQ ID NO: 272, 188, 200, 215 respectively (AksA, D, E and F respectively) and functional analogous thereof.

[0134] In a particularly preferred embodiment, one, two three or each of these genes selected from the group of AksA, AksD, AksE and AksF genes comprise a sequence selected from the sequences represented by represented by SEQ ID NO: 274, 190, 202, 217 respectively (AksA, D, E and F respectively) and functional analogous thereof.

[0135] In yet a further particularly preferred embodiment, one, two three or each of these genes selected from the group of AksA, AksD, AksE and AksF genes comprise a sequence selected from the sequences represented by respectively SEQ ID NO: 161, 162, 163, 164, 165, 166, 167, 168, 169, 170, 171, 172, 173, 174 respectively (AksA, D, E and F respectively) and functional analogous thereof. In yet a further particularly preferred embodiment, one, two three or each of these genes comprise a sequence selected from the sequences represented by respectively SEQ ID NO: 177, 178, 179, 180 respectively (AksA, D, E and F respectively) and functional analogous thereof.

[0136] In yet a further particularly preferred embodiment, one, two three or each of these genes selected from the group of AksA, AksD, AksE and AksF genes comprise a sequence selected from the sequences represented by respectively SEQ ID NO: 260, 224, 236, 248, respectively (AksA, D, E and F respectively) and functional analogous thereof.

[0137] In yet a further particularly preferred embodiment, one, two three or each of these genes selected from the group of AksA, AksD, AksE and AksF genes comprise a sequence selected from the sequences represented by respectively SEQ ID NO: 263, 227, 239, 251, respectively (AksA, D, E and F respectively) and functional analogous thereof.

[0138] In yet a further particularly preferred embodiment, one, two three or each of these genes selected from the group of AksA, AksD, AksE and AksF genes comprise a sequence selected from the sequences represented by respectively SEQ ID NO: 281, 194, 206, 221, respectively (AksA, D, E and F respectively) and functional analogous thereof.

[0139] In yet a further particularly preferred embodiment, one, two three or each of these genes comprise a sequence selected from the sequences represented by respectively SEQ ID NO: 272, 188, 200, 215, respectively (AksA, D, E and F respectively) and functional analogous thereof.

[0140] In a particularly preferred embodiment, the genome of the cell comprises a nucleic acid sequence represented by sequence ID145, or a functional analogue thereof, a nucleic acid sequence represented by sequence ID146, or a functional analogue thereof, a nucleic acid sequence represented by sequence ID147, or a functional analogue thereof, a nucleic acid sequence represented by sequence ID148, or a functional analogue thereof, and a nucleic acid sequence represented by sequence ID149, or a functional analogue thereof.

[0141] In a particularly preferred embodiment, the genome of the cell comprises a nucleic acid sequence represented by sequence ID146, or a functional analogue thereof, a nucleic acid sequence represented by sequence ID147, or a functional analogue thereof, a nucleic acid sequence represented by sequence ID148, or a functional analogue thereof, and a nucleic acid sequence represented by sequence ID149, or a functional analogue thereof.

[0142] In a particularly preferred embodiment, the genome of the cell comprises a nucleic acid sequence represented by sequence ID172, or a functional analogue thereof, a nucleic acid sequence represented by sequence ID173, or a functional analogue thereof, a nucleic acid sequence represented by sequence ID174, or a functional analogue thereof, and a nucleic acid sequence represented by sequence ID149, or a functional analogue thereof.

[0143] In a particularly preferred embodiment, the genome of the cell comprises a nucleic acid sequence represented by sequence ID224, or a functional analogue thereof, a nucleic acid sequence represented by sequence ID236, or a functional analogue thereof, a nucleic acid sequence represented by sequence ID248, or a functional analogue thereof, and a nucleic acid sequence represented by sequence ID149, or a functional analogue thereof.

[0144] In a particularly preferred embodiment, the genome of the cell comprises a nucleic acid sequence represented by sequence ID227, or a functional analogue thereof, a nucleic acid sequence represented by sequence ID239, or a functional analogue thereof, a nucleic acid sequence represented by sequence ID251, or a functional analogue thereof, and a nucleic acid sequence represented by sequence ID149, or a functional analogue thereof.

[0145] In a particularly preferred embodiment, the genome of the cell comprises a nucleic acid sequence represented by sequence ID194, or a functional analogue thereof, a nucleic acid sequence represented by sequence ID206, or a functional analogue thereof, a nucleic acid sequence represented by sequence ID221, or a functional analogue thereof, and a nucleic acid sequence represented by sequence ID 149, or a functional analogue thereof.

[0146] In a particularly preferred embodiment, the genome of the cell comprises a nucleic acid sequence represented by sequence ID188, or a functional analogue thereof, a nucleic acid sequence represented by sequence ID200, or a functional analogue thereof, a nucleic acid sequence represented by sequence ID215, or a functional analogue thereof, and a nucleic acid sequence represented by sequence ID 149, or a functional analogue thereof.

[0147] In a particularly preferred embodiment, the genome of the cell comprises a nucleic acid sequence represented by sequence ID177, or a functional analogue thereof, a nucleic acid sequence represented by sequence ID178, or a functional analogue thereof, a nucleic acid sequence represented by sequence ID179, or a functional analogue thereof, a nucleic acid sequence represented by sequence ID180, or a functional analogue thereof, and a nucleic acid sequence represented by sequence ID149, or a functional analogue thereof.

[0148] In a particularly preferred embodiment, the genome of the cell comprises a nucleic acid sequence represented by sequence ID224, or a functional analogue thereof, a nucleic acid sequence represented by sequence ID236, or a functional analogue thereof, a nucleic acid sequence represented by sequence ID248, or a functional analogue thereof, a nucleic acid sequence represented by sequence ID260, or a functional analogue thereof, and a nucleic acid sequence represented by sequence ID149, or a functional analogue thereof.

[0149] In a particularly preferred embodiment, the genome of the cell comprises a nucleic acid sequence represented by sequence ID227, or a functional analogue thereof, a nucleic acid sequence represented by sequence ID239, or a functional analogue thereof, a nucleic acid sequence represented by sequence ID251, or a functional analogue thereof, a nucleic acid sequence represented by sequence ID263, or a functional analogue thereof, and a nucleic acid sequence represented by sequence ID149, or a functional analogue thereof.

[0150] In a particularly preferred embodiment, the genome of the cell comprises a nucleic acid sequence represented by sequence ID194, or a functional analogue thereof, a nucleic acid sequence represented by sequence ID206, or a functional analogue thereof, a nucleic acid sequence represented by sequence ID221, or a functional analogue thereof, a nucleic acid sequence represented by sequence ID281, or a functional analogue thereof, and a nucleic acid sequence represented by sequence ID149, or a functional analogue thereof.

[0151] In a particularly preferred embodiment, the genome of the cell comprises a nucleic acid sequence represented by sequence ID188, or a functional analogue thereof, a nucleic acid sequence represented by sequence ID200, or a functional analogue thereof, a nucleic acid sequence represented by sequence ID215, or a functional analogue thereof, a nucleic acid sequence represented by sequence ID272, or a functional analogue thereof, and a nucleic acid sequence represented by sequence ID149, or a functional analogue thereof.

[0152] Good results with respect to the production of AKP have been achieved with a E. coli host cell of which the genome comprises heterologous nucleic acid sequences, represented by SEQ ID No's: 149, 167, 168, 169 and 170.

[0153] Good results with respect to the production of AKP have been achieved with a E. coli host cell of which the genome comprises heterologous nucleic acid sequences, represented by SEQ ID No's: 149, 168, 169 and 170.

[0154] Good results with respect to the production of AKP have been achieved with a S. cerevisiae host cell of which the genome comprises heterologous nucleic acid sequences, represented by sequence ID's 149, 172, 173 and 174.

[0155] Good results with respect to the production of AKP have been achieved with a E. coli host cell of which the genome comprises heterologous nucleic acid sequences, represented by SEQ ID No's: 149, 177, 178, 179, 180.

[0156] Good results with respect to the production of AKP have been achieved with a E. coli host cell of which the genome comprises heterologous nucleic acid sequences, represented by SEQ ID No's: 149, 224, 236, 248.

[0157] Good results with respect to the production of AKP have been achieved with a E. coli host cell of which the genome comprises heterologous nucleic acid sequences, represented by SEQ ID No's: 149, 227, 239, 251.

[0158] Good results with respect to the production of AKP have been achieved with a E. coli host cell of which the genome comprises heterologous nucleic acid sequences, represented by SEQ ID No's: 149, 194, 206, 221.

[0159] Good results with respect to the production of AKP have been achieved with a E. coli host cell of which the genome comprises heterologous nucleic acid sequences, represented by SEQ ID No's: 149, 188, 200, 251.

[0160] The heterologous cell may in particular be a cell as mentioned above when describing the biocatalyst.

[0161] In a specific embodiment, the cell comprises one or more nucleic acid sequences, which may be homologous or heterologous, encoding an enzyme system capable of catalysing the conversion of alpha-ketoglutaric acid into alpha-ketoadipic acid, wherein said enzyme system forms part of the AAA biosynthetic pathway for lysine biosynthesis, such as described in more detail above.

[0162] The heterologous cell is preferably free of aminotransferase activity capable of catalysing the conversion of -alpha-ketoadipate into alpha-aminoadipate. If naturally present in the cell, the activity may be removed, decreased or modified by inactivation, modification or deletion of the gene or genes encoding such enzymes in the cells DNA. This activity may originate from one or more biocatalysts. These may also be modified e.g. by molecular evolution or rational design to not possess any undesired activity any more but to retain any desired activity (e.g. any activity in the context of the invention or an activity required for metabolism of the host cell).

[0163] The heterologous cell is preferably free of any enzyme(s) which can degrade or convert AKP, 5-FVAor adipic acid into any undesired side product. If any such activity e.g. as part of a adipate degradation pathway is identified this activity can be removed, decreased or modified as described herein above.

[0164] Preferably, the cell comprises one or more heterologous nucleic acid sequences encoding one or more enzymes catalysing the C₁-elongation of alpha-ketoglutaric acid into alpha-ketoadipic acid and/or C₁-elongation of alpha-ketoadipic acid into alpha-ketopimelic acid. Suitable nucleic acid sequences may in particular be selected amongst nucleic acid sequences encoding an Aks enzyme or an homologue thereof, such as identified above.

[0165] In particular in case the cell is intended to be used for preparing AKP, which in turn is to be converted into a further product, such as 5-FVA or adipic acid, it is preferred that the heterologous cell comprises a nucleic acid sequence encoding an enzyme catalysing such conversion. This may be advantageous, for instance in that at least some enzymes catalysing C₁-elongation, which may be active in the cell may be capable of catalysing the undesired elongation of AKP. By expressing an enzyme capable of catalysing the conversion of AKP into a desired product (e.g.ss 5-FVA), such as a decarboxylase, in the cell, it is contemplated that such undesired elongation may be reduced or substantially avoided, also if the enzyme or enzymes catalysing the elongation are in principle capable of using AKP as a substrate.

[0166] It is noted that some of the enzymes involved in C₁-elongations e.g. in M. jannashii or A. vinelandii have relaxed substrate specificity and are able to convert substrates of different carbon length. It is known for many enzymes that they have a relaxed substrate specificity which allows them to convert unnatural substrates. In order to improve the efficiency of a heterologous cell (used in a method) according to the invention, it is particularly preferred to provide an enzyme system capable of catalysing a reaction step in the preparation of AKP from AKG that shows a high catalytic activity towards the elongation of AKG into AKA and/or the elongation of AKA into AKP, yet a low catalytic activity towards the further elongation of AKP. (A nucleic acid sequence coding for) one or more enzymes capable of catalysing a reaction step in the preparation of AKP from AKG may be modified by a technique such as described above in order to increase the reaction specificity with respect to elongation of AKG and/or AKA, and/or (a nucleic acid sequence coding for) such enzyme may be modified such that the binding affinity for AKP (as a substrate) is reduced such that the catalytic activity with respect to the elongation of AKP is reduced.

[0167] Such modification may involve molecular evolution to create diversity followed by screening for desired mutants and/or rational engineering of substrate binding pockets. Techniques to modify the substrate specificity of an enzyme used in a method of the invention may be based on those described in the art. In particular, an AksA enzyme or homologue thereof, capable of catalysing “reaction a” of the C₁-elongation may be evolved such that the catalytic activity with respect to catalysing the elongation of AKP to alpha-ketosuberate is reduced, relatively to the catalytic activity with respect to catalysing the elongation of AKA to AKP and/or AKG to AKA. Preferably, such enzyme shows no substantial catalytic activity with respect to catalysing the elongation of AKP to alpha-ketosuberate. It is thought that in particular the enzyme catalysing “reaction a” controls the maximum chain length obtainable by the C₁-elongation.

[0168] For instance, rational engineering employing structural and sequence information to design specific mutations has been utilised to modify the substrate specificity of the acyl transferase domain 4 from the erythromycin polyketide synthase to accept alternartive acyl donors. It has been shown that modifying the proposed substrate binding site resulted in a modified binding pocket able to accommodate alternative substrates resulting in a different product ratio (Reeves, C. D.; Murli, S.; Ashley, G. W.; Piagentini, M.; Hutchinson, C. R.; McDaniel, R. Biochemistry 2001, 40(51), 15464-15470). Both rational design and molecular evolution approaches have been used to alter the substrate specificity of the biocatalyst BM3 resulting in a large number of mutants capable of oxidizing a large variety of different alkenes, cycloalkenes, arenes and heteroarenes instead or in addition to the natural substrate of medium chain fatty acids (e.g. myristic acid) (Peters, M. W.; Meinhold, P.; Glieder, A.; Arnold, F. H. Journal of the American Chemical Society 2003, 125(44), 13442-13450; Appel, D.; Lutz-Wahl, S.; Fischer, P.; Schwaneberg, U.; Schmid, R. D. Journal of Biotechnology 2001, 88(2), 167-171 and references therein).

[0169] In an embodiment, the heterologous cell comprises a heterologous nucleic acid sequence encoding a homocitrate synthase that has been evolved from a homocitrate synthase, which accepted alpha-ketoglutarate as a substrate but for which alpha-ketoadipate was not a suitable substrate, to also accept alpha-ketoadipate as a substrate. Such enzyme may in particular be a fungal enzyme or bacterial enzyme involved in lysine biosynthesis via the AAA pathway e.g. from Penicillium, Cephalosporium, Ustilago, Cephalosporium, Paelicomyces, Trichophytum, Phanerochaete, Emericella, Aspergillus, Yarrowoa, Schizosaccharomyces, Pichia, Hansenula, Klyuveromyces, Candida, Saccharomyces, Thermus, or Deinococcus, or from nitrogen fixing bacteria, e.g. Azotobacter, Frankia, Synecchocystis, Anabaena, Microcyctis, Rhizobium, Bradyrhizobium, Klebsiella, or Pseudomonas. In particular an enzyme such as NifV from Azotobacter vinelandii may be used, which was demonstrated to have initial activity on AKA (Zheng, L.; White, R. H.; Dean, D. R. The Journal of Bacteriology 1997, 179(18), 5963-5966). In Sequence ID 149 a gene encoding said enzyme is shown.

[0170] The heterologous cell may in particular comprise a nucleic acid sequence encoding an Aks enzyme or homologue thereof, such as identified above, more in particular the cell may at least comprise a nucleic acid sequence encoding an

[0171] Aks enzyme or a homologue thereof, preferably a nucleic acid sequence encoding an enzyme may be used represented by any of the sequence ID's 4,5,6,7,8,9, 10, 11, 12, 13 44, 45, 46, 47, 48, 49, 50, 51, 52, 53, 69, 70, 71, 72, 73, 74, 75, 76, 77, 261 ,264, 267, 270, 273, 276, 279, 282 or a homologue thereof.

[0172] In a further preferred embodiment the cell comprises at least one nucleic acid sequence encoding an enzyme represented by any of the sequence ID's 14, 15, 16, 17, 18, 19, 20, 21, 22, 23, 54, 55, 56, 57, 58, 59, 60, 61, 186, 189, 192, 195, 225, 228, 231, 234 or a homologue thereof.

[0173] In a further preferred embodiment the cell comprises at least one nucleic acid sequence encoding an enzyme represented by any of the sequence ID's 24, 24, 25, 26, 27, 28, 29, 30, 31, 32, 33, 198, 201, 204, 207, 237, 240, 243, 246 or a homologue thereof.

[0174] In a further preferred embodiment the cell comprises at least one nucleic acid sequence encoding an enzyme represented by any of the sequence ID's 34, 35, 36, 37, 38, 39, 40, 41, 42, 43, 62, 63, 64, 65, 66, 67, 210, 213, 216, 219, 222, 249, 252, 255, 258 or a homologue thereof.

[0175] In an embodiment, the heterologous organism is based on a host cell that has the AAA pathway for lysine biosynthesis, wherein a homocitrate synthase, capable of catalysing “reaction a” in the C-elongation (such as AksA or a homologue thereof) may be heterologously expressed. Such homocitrate synthase preferably is capable of selectively catalysing a reaction step in the elongation of AKG and/or AKA (reaction a), without substantially catalysing the elongation of AKP. In such a case it may be beneficial to delete any endogenous homo citrate synthase, in particular if it is capable of catalysing “reaction a” in the elongation reaction of AKP. Such a host cell may then effectively contain one or more homo citrate synthases functionally active in the C₁-elongation of AKG to AKA and/or AKA to AKP. Further reactions to realise the elongation of AKG and/or AKA may then be catalysed by enodogenous enzymes, such as those enzymes involved in the aminoadipate pathway.

[0176] In a preferred embodiment, a heterologous cell according to the invention comprises a nucleic acid sequence encoding an enzyme with AKP decarboxylase activity.

[0177] In a preferred embodiment, a heterologous cell according to the invention comprises a nucleic acid sequence encoding an enzyme with AKP-decarboxylase activity and a nucleic acid sequence encoding an enzyme with adipic acid dehydrogenase activity.

[0178] The adipate prepared in accordance with the invention may be used as an intermediate for the production of a further compound, such as an adipate ester or a polymer. In particular the polymer may be selected from the group of polyesters, polyurethanes and polyamides.

[0179] Accordingly, the invention further relates to a method for preparing a polymer, comprising reacting adipic acid prepared in a method for preparing adipic acid according to the invention, with a compound having at least two functional groups capable of reacting with the carboxylate functions of adipic acid, thereby forming the polymer. Functional groups that can react with the carboxylate functions are generally known, and include hydroxy groups, amine groups (in particular primary amine groups), and isocyanate groups.

[0180] For preparing a polyamide, an amine having at least two amine functionalities can be reacted with adipic acid. In principle any such polyamine may be used, in particular any amino-alkane having 2-12 carbon atoms. In a preferred method, the adipic acid is reacted with hexamethylene diamine or 1,4 diamino butane. This reaction can be carried out in a manner generally known in the art.

[0181] For preparing a polyester a alcohol having at least two hydroxy functionalities can be reacted with adipic acid. In principle any such polyol may be used, in particular any polyol having having 2-12 carbon atoms. This reaction can be carried out in a manner generally known in the art.

[0182] Further, the adipic acid may be used to prepare an adipate ester, which may e.g. be used as a plasticiser for polymeric materials.

[0183] Accordingly, the invention further relates to a method for preparing an adipate ester, comprising reacting adipic acid prepared in a method for preparing adipic acid according to the invention with an alcohol. In principle any organic acid, in particular any alochol having 1-12 carbon atoms may be used. This reaction can be carried out in a manner generally known in the art.

[0184] The invention will now be illustrated by the following examples.

### EXAMPLES

### Example 1

### General Methods

[0185] Molecular and Genetic Techniques

[0186] Standard genetic and molecular biology techniques are generally known in the art and have been previously described (Maniatis et al. 1982 “Molecular cloning: a laboratory manual”. Cold Spring Harbor Laboratory, Cold Spring Harbor, N.Y.; Miller 1972 “Experiments in molecular genetics”, Cold Spring Harbor Laboratory,

[0187] Cold Spring Harbor; Sambrook and Russell 2001 “Molecular cloning: a laboratory manual” (3rd edition), Cold Spring Harbor Laboratory, Cold Spring Harbor Laboratory Press; F. Ausubel et al, eds., “Current protocols in molecular biology”, Green Publishing and Wiley Interscience, New York 1987).

[0188] Plasmids and Strains

[0189] pMS470 (Balzer, D.; Ziegelin, G.; Pansegrau, W.; Kruft, V.; Lanka, E. Nucleic Acids Research 1992, 20(8), 1851-1858.) and pBBR1MCS (Kovach ME, Phillips R W, Elzer P H, Roop R M 2nd, Peterson K M. Biotechniques. 1994 May;16(5):800-2. pBBR1MCS: a broad-host-range cloning vector) have been described previously. E. coli strains TOP10 and DH10B (Invitrogen, Carlsbad, Calif., USA) were used for all cloning procedures. E. coli strains BL21 A1 (Invitrogen, Carlsbad, Calif., USA) and BL21 (Novagen (EMD/Merck), Nottingham, UK) were used for protein expression.

[0190] pRS414, pRS415 and pRS416 (Sikorski, R. S. and Hieter, P. A system of shuttle vectors and yeast host strains designed for efficient manipulation of DNA in Saccharomyces cerevisiae Genetics 122 (1), 19-27 (1989); Christianson,T. W., Sikorski, R. S., Dante, M., Shero, J. H. and Hieter, P. Multifunctional yeast high-copy-number shuttle vectors. Gene 110 (1), 119-122 (1992)) were used for expression in S. cerevisiae. S. cerevisiae strains CEN.PK 113-6B (ura3, trp1, leu2, MATa), CEN.PK 113-5D (ura3, MATa), CEN.PK 102-3A (ura3, leu2, MATa) and CEN.PK 113-9D (ura3, trp1, MATa) were used for protein expression.

[0191] Media

[0192] 2×TY medium (16 g/l tryptopeptone, 10 g/l yeast extract, 5 g/l NaCl) was used for growth of E. coli. Antibiotics (100 μg/ml ampicillin, 50-100 μg/ml neomycin) were supplemented to maintain plasmids in E. coli. For induction of gene expression in E. coli arabinose (for BL21-A1 derivatives) and IPTG (for pMS470, pBBR1MCS derivatives) were used at 0.02% (arabinose) and 0.2 mM (IPTG) final concentrations. AKP production by E. coli was done in M9 minimal medium (12.8 g/L Na₂HPO₄.7H₂O, 3 g/L KH₂PO₄, 0.5 g/L NaCl, 1 g/L NH₄Cl, 2 mM MgSO₄, 0.1 mM CaCl₂) with glucose (1-4%) or glycerol (1-4%) as carbon source, as further specified below.

[0193] Verduyn medium with 4% galactose was used for growth of S. cerevisiae.

[0194] Identification of Plasmids

[0195] Plasmids carrying the different genes were identified by genetic, biochemical, and/or phenotypic means generally known in the art, such as resistance of transformants to antibiotics, PCR diagnostic analysis of transformant or purification of plasmid DNA, restriction analysis of the purified plasmid DNA or DNA sequence analysis. Integrity of all new constructs described was confirmed by restriction digest and, if PCR steps were involved, additionally by sequencing.

[0196] UPLC-MS/MS Analysis Method for the Determination of α-keto acids, 6-ACA, 5-FVA, Adipate and homo₍ₙ₎Citrate

[0197] A Waters HSS T3 column 1.8 μm, 100 mm*2.1 mm was used for the separation of alpha-keto acids, 6-ACA, 5-FVA and homo(n)citrate with gradient elution as depicted in table 1. Eluens A consists of LC/MS grade water, containing 0.1% formic acid, and eluens B consists of acetonitrile, containing 0.1% formic acid. The flow-rate was 0.25 ml/min and the column temperature was kept constant at 40° C.

TABLE 1
gradient elution program used for the separation of α-keto
acids, 6-ACA, 5-FVA, Adipate and homo₍ₙ₎citrate

| Time (min) | 0 | 5.0 | 5.5 | 10 | 10.5 | 15 |
|---|---|---|---|---|---|---|
| % A | 100 | 85 | 20 | 20 | 100 | 100 |
| % B | 0 | 15 | 80 | 80 | 0 | 0 |

[0198] A Waters micromass Quattro micro API was used in electrospray either positive or negative ionization mode, depending on the compounds to be analyzed, using multiple reaction monitoring (MRM). The ion source temperature was kept at 130° C., whereas the desolvation temperature is 350° C., at a flow-rate of 500 L/hr.

[0199] For AKG, AKA, AKP, 5-FVA, adipate, homo-citrate and homo2-citrate the deprotonated molecule was fragmented with 10-14 eV, resulting in specific fragments from losses of e.g. H₂O, CO and CO₂.

[0200] For 6-ACA the protonated molecule was fragmented with 13 eV, resulting in specific fragments from losses of H₂O, NH₃ and CO.

[0201] To determine concentrations, a calibration curve of external standards of synthetically prepared compounds was run to calculate a response factor for the respective ions. This was used to calculate the concentrations in samples. Samples were diluted appropriately (2-10 fold) in eluent A to overcome ion suppression and matrix effects.

### Example 2

### Production of AKP by E. coli

[0202] Construction of an AKP Biosynthetic Pathway

[0203] Protein sequences for the Methanococcus jannaschii proteins homocitrate synthase (AksA, MJ0503, [Sequence ID 4]), homoaconitase small subunit (AksE, MJ1271, [Sequence ID 24]), homoaconitase large subunit (AksD, MJ1003, [Sequence ID 14]) and homoisocitrate dehydrogenase (AksF, MJ1596, [Sequence ID 34]), homologues thereof from Methanococcus maripaludis C5 (homocitrate synthase (AksA, MmarC5_{—}1522, [Sequence ID 7]), homoaconitase small subunit (AksE, MmarCS 1257, [Sequence ID 27]), homoaconitase large subunit (AksD, MmarCS 0098, [Sequence ID 17]) and homoisocitrate dehydrogenase (AksF, MmarCS 0688, [Sequence ID 37]), and A. vinelandii homocitrate synthase NifV, [Sequence ID 75]) were retrieved from databases.

[0204] M. jannaschii and M. maripaludis genes were codon pair optimized for E. coli (using methodology described in WO08000632) and constructed synthetically (Geneart, Regensburg, Germany). In the optimization procedure internal restriction sites were avoided and common restriction sites were introduced at the start and stop to allow subcloning in expression vectors. Also, upstream of AksD the sequence of the tac promoter from pMS470 was added. Each ORF was preceded by a consensus ribosomal binding site and leader sequence to drive translation in pMS470. Also, upstream of AksD the sequence of the tac promoter from pMS470 was added. A synthetic AksA [M. jannashii Sequence ID 167, M. maripaludis Sequence ID 177]/AksF [M. jannashii Sequence ID 168, M. maripaludis Sequence ID 178] cassette was cut with NdeI/XbaI and a synthetic AksD [M. jannashii Sequence ID 169, M. maripaludis Sequence ID 179]/AksE [M. jannashii Sequence ID 170, M. maripaludis Sequence ID 180] cassette was cut with XbaI/HindIII. Fragments containing Aks genes from M. jannashii were inserted in the NdeI/HindIII sites of pMS470 to obtain vector pAKP-180. Fragments containing Aks genes from M. maripaluids were inserted in the NdeI/HindIII sites of pMS470 to obtain vector pAKP-182.

[0205] An E. coli expression construct (pDB555) containing NifV from Azotobacter vinelandii [Sequence ID 149] was obtained from D. Dean (Zheng L, White R H, Dean DR. Purification of the Azotobacter vinelandii nifV-encoded homocitrate synthase. J Bacteriol. 1997 September;179(18):5963-6). The nifV gene was PCR amplified using phusion DNA polymerase (Finnzymes) from this vector using primers Avine-WT-R-BamHI [Sequence ID 150] and Avine-WT-F-SacI [Sequence ID 151] and cloned in pAKP-180 upstream of AksA with BamHI/SacI resulting in vector pAKP-281[ ]. The nifV gene was also PCR amplified from this vector using primers Avine-WT-R-HindIII [Sequence ID 152] and Avine-WT-F-HindIII [Sequence ID 153] and cloned in pAKP-180 and pAKP-182 downstream of AksE [Sequence ID 170] with HindIII resulting in vector pAKP-279 and pAKP-280, respectively.

[0206] To inactivate the aksA gene in pAKP279 and pAKP281, respectively the plasmids were digested with BamHI and BglII resulting in three fragments (566 bps, 1134 bps, and 7776 bps). The 1134 bps and 7776 bps sized fragments were isolated from agarose gels and ligated with each other. After transformation to E. coli plasmids were checked for orientation and plasmids in which both fragments are oriented the same way as in the original plasmids pAKP279 and pAKP281 were selected resulting in pAKP322 and pAKP323, respectively.

[0207] Protein Expression and Metabolite Production in E. coli

[0208] Plasmids pAKP-279, pAKP-280, pAKP-281, pAKP-322 and pAKP-323 were transformed to E. coli BL21 for expression. Starter cultures were grown overnight in tubes with 10 ml 2*TY medium. 200 μl culture was transferred to shake flasks with 20 ml 2*TY medium. Flasks were incubated in an orbital shaker at 30° C. and 280 rpm. After 4 h IPTG was added at a final concentration of 0.2 mM and flasks were incubated for 4-16 h at 30° C. and 280 rpm. Cells from 20 ml culture were collected by centrifugation and resuspended in 4 ml M9 medium with a suitable carbon source in 24 well plates. After incubation for 24-72 h at 30-37° C. and 210 rpm cells were collected by centrifugation and pellet and supernatant were separated and stored at −20C for analysis.

[0209] Preparation of Cell Fraction for Analysis

[0210] Cells from small scales growth (see previous paragraph) were harvested by centrifugation. The cell pellets were resuspended in 1 ml of 100% ethanol and vortexed vigorously. The cell suspension was heated for 2 min at 95° C. and cell debris was removed by centrifugation. The supernatant was evaporated in a vacuum dryer and the resulting pellet was dissolved in 200 μl deionized water. Remaining debris was removed by centrifugation and the supernatant was stored at −20° C.

[0211] Analysis of Supernatant and Cell Extract

[0212] Supernatant and extracts from cell fraction were diluted 5 times with water prior to UPLC-MS/MS analysis. Results clearly show presence of AKP and AAP in recombinant strains. It is contemplated that the conversion of AKP to AAP is catalyzed by a natural aminotransferase present in E. coli.

TABLE 2
AKP production with glucose or glycerol as carbon source

| Plasmid | Fraction | Carbon source | AKP [mg/l] | AAP [mg/l] |
|---|---|---|---|---|
| pAKP-279 | supernatant | Glucose | 3 | n.d. |
| pAKP-279 | cell | Glucose | 2 | n.d. |
| pAKP-281 | supernatant | Glucose | 3 | n.d. |
| pAKP-281 | cell | Glucose | 2 | n.d. |
| pAKP-280 | supernatant | Glucose | 2 | n.d. |
| pAKP-322 | supernatant | Glucose | 10 | 3 |
| pAKP-322 | cell | Glucose | 8 | 12 |
| pAKP-323 | supernatant | Glucose | 7 | 3 |
| pAKP-323 | cell | Glucose | 7 | 1 |
| — | supernatant | Glucose | n.d. | n.d. |
| — | cell | Glucose | n.d. | n.d. |
| pAKP-281 | supernatant | glycerol | 12 | 1 |
| pAKP-281 | cell | glycerol | 6 | 4 |
| pAKP-322 | supernatant | glycerol | 57 | 5 |
| pAKP-322 | cell | glycerol | 8 | 12 |
| pAKP-323 | supernatant | glycerol | 47 | 4 |
| pAKP-323 | cell | glycerol | 4 | 7 |
| — | supernatant | glycerol | n.d. | n.d. |
| — | cell | glycerol | n.d. | n.d. |

n.d. = not detectible

[0213] Results clearly show presence of AKP and AAP in recombinant strains. It is contemplated that the conversion of AKP to AAP is catalyzed by a natural aminotransferase present in E. coli. Removing AksA from the constructs has a positive effect on the amount of AKP and AAP produced.

### Example 3

### Production of AKP by S. cerevisiae

[0214] Construction of an AKP Biosynthetic Pathway

[0215] M. jannaschii genes were codon pair optimized for S. cerevisiae (using methodology described in WO08000632). Promoter and terminator sequences were retrieved from the S. cerevisiae genome database (www.yeastgenome.org, as available on Mar. 31, 2008). The T at position −5 in the tpi1 promoter was changed to A to generate a consensus kozak sequence for S. cerevisiae. Promoter-gene-terminator cassettes were made synthetically (Geneart, Regensburg, Germany), as shown in Table 3.

TABLE 3
Promoter-gene-terminator cassettes

| Promoter | Gene | Terminator |
|---|---|---|
| tdh1 | MJ0503 [Sequence ID 171] | tdh1 |
| tpi1 | MJ1003 [Sequence ID 172] | tpi1 |
| eno1 | MJ1271 [Sequence ID 173] | eno1 |
| tdh3 | MJ1596 [Sequence ID 174] | tdh3 |

[0216] In the optimization procedure internal restriction sites were avoided and common restriction sites were introduced at the beginning and end to allow subcloning in expression vectors.

[0217] The synthetic AksA cassette was cut with SalI/EcoRI and the synthetic AksF cassette was cut with EcoRI/XbaI and both fragments were ligated to pRS415 to obtain pAKP-136. Similarly synthetic AksD and AksE cassettes were inserted into pRS416 to obtain pAKP-146. The AksA-AksF cassette from pAKP-136 was digested with XhoI/KpnI and inserted in pAKP-146 resulting in pAKP-141. Analogous constructs were synthetically made which have a 207 bp sequence encoding a mitochondrial signal peptide (mtSP) [Sequence ID 158] N-terminally fused to MJ0503, MJ1271, MJ1003 and MJ1596 (Pfanner N, Neupert W. Distinct steps in the import of ADP/ATP carrier into mitochondria. J Biol Chem. 1987 Jun. 5;262(16):7528-36.). Synthetic fragments consisting of a promoter-mtSP-gene-terminator were combined in pRS416 to obtain pAKP-140. nifV was PCR amplified from pDB555 using Phusion DNA polymerase with primers AksA-Avine-F [Sequence ID 154] and AksA-Avine-R1 [Sequence ID 155]. The gal2 promoter was amplified from pAKP-47 using phusion DNA polymerase with primers Pgal2-F2 [Sequence ID 156] and Pgal2-R [Sequence ID 157]. Both PCR fragments were fused by PCR using Phusion DNA polymerase and primers Pgal2-F2 [Sequence ID 153] and AksA-Avine-R1 [Sequence ID 155] and the resulting fusion product was cloned in pAKP-47 with Hpal/Ascl resulting in pPga12-nifV-Ttdh1. The pPga12-nifV-Ttdh1 cassette was removed from this construct by Kpnl/Spel and inserted into Kpnl/Spel digested pAKP-140 and pAKP-141 replacing MJ0503 (AksA) [Sequence ID 167] and resulting in constructs pAKP-305 and pAKP-306 respectively.

[0218] Construction of an AKP Producing S. cerevisiae Strain

[0219] S. cerevisiae strain CEN.PK113-5D was transformed with 1 μg of pAKP-305 or pAKP-306 plasmid DNA according to the method as described by Gietz and Woods (Gietz, R. D. and Woods, R. A. (2002). Transformation of yeast by the Liac/SS carrier DNA/PEG method. Methods in Enzymology 350: 87-96). Cells were plated on agar plates with 1× Yeast Nitrogen Base without amino acids and 2% glucose.

[0220] Production of AKP with S. cerevisiae

[0221] For production of AKP, starter cultures were aerobically grown overnight in 10 ml tubes containing Verduyn medium with 4% galactose at 30° C. and 280 rpm. Cultures were diluted to an OD of 0.5 in 25 ml fresh Verduyn medium with 4% galactose and incubated anaerobically and aerobically at 30° C. and 280 rpm for 2 and 5 days (aerobic cultures) an 4 days (anaerobic cultures). Cells were harvested by centrifugation and supernatant and cell fraction samples were prepared for UPLC-MS/MS analysis as described for E. coli in the Example 2.

TABLE 4
Results

| Plasmid | Fraction | AKP [mg/l] |
|---|---|---|
| pAKP305 | Supernatant | 1 |
| pAKP305 | Cell | 2 |
| pAKP306 | Supernatant | 1 |

### Example 4

### Cloning of Target Genes for Aminotransferases and Decarboxylases

[0222] Design of Expression Constructs

[0223] attB sites were added to all genes upstream of the ribosomal binding site and start codon and downstream of the stop codon to facilitate cloning using the Gateway technology (Invitrogen, Carlsbad, Calif., USA).

[0224] Gene Synthesis and Construction of Plasmids

[0225] Synthetic genes were obtained from DNA2.0 and codon optimised for expression in E. coli according to standard procedures of DNA2.0. The aminotransferase genes from Vibrio fluvialis JS17 [SEQ ID No. 1] and Bacillus weihenstephanensis KBAB4 [SEQ ID No. 82] encoding the amino acid sequences of the V. fluvialis JS17 ω-aminotransferase [SEQ ID No. 2] and the B. weihenstephanensis KBAB4 aminotransferase (ZP_{—}01186960) [SEQ ID No. 83], respectively, were codon optimised and the resulting sequences [SEQ ID No. 3] and [SEQ ID No. 85] were obtained by DNA synthesis.

[0226] The genes from Escherichia coli [SEQ ID No. 105], Saccharomyces cerevisiae [SEQ ID No. 108], Zymomonas mobilis [SEQ ID No. 111], Lactococcus lactis [SEQ ID No. 114], [SEQ ID No. 117], and Mycobacterium tuberculosis [SEQ ID No. 120] encoding the amino acid sequences of the V. fluvialis JS17 ω-aminotransferase [SEQ ID No. 3], the B. weihenstephanensis KBAB4 aminotransferase (ZP_{—}01186960) [SEQ ID No. 84], the Escherichia coli diaminopimelate decarboxylase LysA [SEQ ID No. 106], the Saccharomyces cerevisiae pyruvate decarboxylase Pdc [SEQ ID No. 109], the Zymomonas mobilis pyruvate decarboxylase Pdc1472A [SEQ ID No. 112], the Lactococcus lactis branched chain alpha-keto acid decarboxylase KdcA [SEQ ID No. 115] and alpha-ketoisovalerate decarboxylase KivD [SEQ ID No. 118], and the Mycobacterium tuberculosis alpha-ketoglutarate decarboxylase Kgd [SEQ ID No. 121], respectively, were also codon optimised and the resulting sequences [SEQ ID No. 107], [SEQ ID No. 110], [SEQ ID No. 63], [SEQ ID No. 116], [SEQ ID No. 119], and [SEQ ID No. 122] were obtained by DNA synthesis, respectively.

[0227] The gene constructs were cloned into pBAD/Myc-His-DEST expression vectors using the Gateway technology (Invitrogen) via the introduced attB sites and pDONR201 (Invitrogen) as entry vector as described in the manufacturer's protocols (www.invitrogen.com). This way the expression vectors pBAD- Vfl_AT, pBAD-Bwe_AT, pBAD-LysA, pBAD-Pdc, pBAD-Pdc1472A, pBAD-kdcA, pBAD-kivD were obtained, respectively The corresponding expression strains were obtained by transformation of chemically competent E. coli TOP10 (Invitrogen) with the respective pBAD-expression vectors.

[0228] Cloning by PCR

[0229] Various genes encoding a biocatalyst were amplified from genomic DNA by PCR using PCR Supermix High Fidelity (Invitrogen) according to the manufacturer's specifications, using primers as listed in the following table.

TABLE 5
overview of primers used for the various genes

| | gene | enzyme | primer |
|---|---|---|---|
| | Sequence | Sequence | Sequence |
| origin of gene | ID | ID | ID's |
| Pseudomonas | 85 | 86 | 87&88 |
| aeruginosa | | | |
| Pseudomonas | 101 | 102 | 135&136 |
| aeruginosa | | | |
| Pseudomonas | 141 | 142 | 147&148 |
| aeruginosa | | | |
| Pseudomonas | 143 | 144 | 149&150 |
| aeruginosa | | | |
| Bacillus subtilis | 89 | 90 | 123&124 |
| Bacillus subtilis | 91 | 92 | 125&126 |
| Bacillus subtilis | 139 | 140 | 145&146 |
| Rhodobacter | 93 | 94 | 127&128 |
| sphaeroides | | | |
| Legionella | 95 | 96 | 129&130 |
| pneumophilia | | | |
| Nitrosomas europaea | 97 | 98 | 131&132 |
| Neisseria | 99 | 100 | 133&134 |
| gonorrhoeae | | | |
| Rhodopseudomonas | 103 | 104 | 137&138 |
| palustris | | | |

[0230] PCR reactions were analysed by agarose gel electrophoresis and PCR products of the correct size were eluted from the gel using the QIAquick PCR purification kit (Qiagen, Hilden, Germany). Purified PCR products were cloned into pBAD/Myc-His-DEST expression vectors using the Gateway technology (Invitrogen) via the introduced attB sites and pDONR-zeo (Invitrogen) as entry vector as described in the manufacturer's protocols. The sequence of genes cloned by PCR was verified by DNA sequencing. This way the expression vectors pBAD-Pae-_gi9946143_AT, pBAD-Bsu_gi16078032_AT, pBAD-Bsu_gi16080075 AT, pBAD-Bsu_gi16077991_AT, pBAD-Rsp_AT, pBAD-Lpn_AT, pBAD-Neu_AT, pBAD-Ngo_AT, pBAD-Pae_gi9951299_AT, pBAD-Pae_gi9951072_AT, pBAD-Pae_gi9951630_AT and pBAD-Rpa_AT were obtained. The corresponding expression strains were obtained by transformation of chemically competent E. coli TOP10 (Invitrogen) with the pBAD constructs.

### Example 5

### Growth of E. coli for Protein Expression

[0231] Small scale growth was carried out in 96-deep-well plates with 940 μl media containing 0.02% (w/v) L-arabinose. Inoculation was performed by transferring cells from frozen stock cultures with a 96-well stamp (Kühner, Birsfelden, Switzerland). Plates were incubated on an orbital shaker (300 rpm, 5 cm amplitude) at 25° C. for 48 h. Typically an OD_{620 nm} of 2-4 was reached.

### Example 6

### Preparation of Cell Lysates

[0232] Preparation of Lysis Buffer

[0233] The lysis buffer contained the following ingredients:

TABLE 6
lysis buffer

| | | |
|---|---|---|
| 1M MOPS pH 7.5 | 5 | ml |
| DNAse I grade II (Roche) | 10 | mg |
| Lysozyme | 200 | mg |
| MgSO₄•7H₂O | 123.2 | mg |
| dithiothreitol (DTT) | 154.2 | mg |
| H₂O (MilliQ) | Balance to 100 | ml |

[0234] The solution was freshly prepared directly before use.

[0235] Preparation of Cell Free Extract by Lysis

[0236] Cells from small scales growth (see previous paragraph) were harvested by centrifugation and the supernatant was discarded. The cell pellets formed during centrifugation were frozen at −20° C. for at least 16 h and then thawed on ice. 500 μl of freshly prepared lysis buffer were added to each well and cells were resuspended by vigorously vortexing the plate for 2-5 min. To achieve lysis, the plate was incubated at room temperature for 30 min. To remove cell debris, the plate was centrifuged at 4° C. and 6000 g for 20 min. The supernatant was transferred to a fresh plate and kept on ice until further use.

[0237] Preparation of Cell Free Extract by Sonification

[0238] Cells from medium scales growth (see previous paragraph) were harvested by centrifugation and the supernatant was discarded. 1 ml of potassium phosphate buffer pH7 was added to 0.5 g of wet cell pellet and cells were resuspended by vigorously vortexing. To achieve lysis, the cells were sonicated for 20 min. To remove cell debris, the lysates were centrifuged at 4° C. and 6000 g for 20 min. The supernatant was transferred to a fresh tube and frozen at −20° C. until further use.

### Example 7

### Preparation of 5-Formylpentanoic Acid by Chemical Hydrolysis of Methyl 5-Formylpentanoate

[0239] The substrate for the aminotransferase reaction i.e. 5-formylpentanoic acid was prepared by chemical hydrolysis of methyl 5-formylpentanoate as follows: a 10% (w/v) solution of methyl 5-formylpentanoate in water was set at pH 14.1 with NaOH. After 24 h of incubation at 20° C. the pH was set to 7.1 with HCl.

### Example 8

### Enzymatic Reactions for Conversion of AKP to 5-formylpentanoic Acid

[0240] A reaction mixture was prepared comprising 50 mM AKP, 5 mM magnesium chloride, 100 μM pyridoxal 5′-phosphate (for LysA) or 1 mM thiamine diphosphate (for all other enzymes) in 100 mM potassium phosphate buffer, pH 6.5. 4 ml of the reaction mixture were dispensed into a reaction vessel. To start the reaction, 1 ml of the cell free extracts obtained by sonification were added, to each of the wells. In case of the commercial oxaloacetate decarboxylase (Sigma-Aldrich product number 04878), 50 U were used. Reaction mixtures were incubated with a magnetic stirrer at 37° C. for 48 h. Furthermore, a chemical blank mixture (without cell free extract) and a biological blank (E. coli TOP10 with pBAD/Myc-His C) were incubated under the same conditions. Samples from different time points during the reaction were analysed by HPLC-MS. The results are summarised in the following table.

TABLE 8
5-FVA formation from AKP in the presence of decarboxylases

| | 5-FVA concentration | | |
|---|---|---|---|
| | [mg/kg] | | |
| Biocatalyst | 3 h | 18 h | 48 h |
| E. coli TOP10/pBAD-LysA | 150 | 590 | 720 |
| E. coli TOP10/pBAD-Pdc | 1600 | 1700 | 1300 |
| E. coli TOP10/pBAD-Pdcl472A | 2000 | 2000 | 1600 |
| E. coli TOP10/pBAD-KdcA | 3300 | 2300 | 2200 |
| E. coli TOP10/pBAD-KivD | 820 | 1400 | 1500 |
| Oxaloacetate decarboxylase | n.d. | 6 | 10 |
| E. coli TOP10 with pBAD/Myc- | n.d. | n.d. | n.d. |
| His C (biological blank) | | | |
| None (chemical blank) | n.d. | n.d. | n.d. |

n.d.: not detectable

[0241] It is shown that 5-FVA is formed from AKP in the presence of a decarboxylase.

### Example 9

### Production of Adipate in E. coli

[0242] Preparation of Constructs for Co-Expression of Aminotransferases and Decarboxylases

[0243] Construction of the plasmids containing genes which encode enzymes for conversion of AKP to 5-formyl valeric acid (5-FVA) and 5-FVA to 6-ACA was done as described in Example 4. It should be noted that the gene encoding the enzyme for catalysing the conversion of 5-FVA to 6-ACA is not needed for the production of adipate and this example can be repeated with a plasmid containing the gene which encode enzymes for conversion of AKP to 5-formyl valeric acid (5-FVA) but not the gene for the enzyme catalysing the conversion of 5-FVA to 6-ACA.

[0244] To allow co-expression of an aminotransferase and a decarboxylase a tac promoter cassette was PCR amplified from pF113 (a derivative of pJF119EH (Fürste, J. P., W. Pansegrau, R. Frank, H. Blocker, P. Scholz, M. Bagdasarian, and E. Lanka. 1986. Molecular cloning of the plasmid RP4 primase region in a multi-host-range tacP expression vector. Gene 48:119-131.) which contains two Notl sites at positions 515 and 5176 respectively with the tac promoter being the start of the numbering), using Phusion DNA polymerase and primers pF113-F-Nsil (aaattatgcatACAGCATGGCCTGCAACG) and pF113-R-Agel (aaattaccggtCAGGGTTATTGTCTCATGAG) and the resulting PCR fragment was fused to NsiI/AgeI digested pBBR1 MCS (Kovach M E, Phillips R W, Elzer P H, Roop R M 2nd, Peterson K M. Biotechniques. 1994 May;16(5):800-2. pBBR1MCS: a broad-host-range cloning vector) resulting in pBBR-lac. The aminotransferase gene from Vibrio fluvialis JS17 ((Seq ID NO:1) was codon optimised (Seq ID NO: 3). This codon optimised gene and the gene from Pseudomonas aeruginosa PA01 coding for AT-Vfl and AT-PA01 (Seq ID 85) respectively were PCR amplified from pBAD/Myc-His-DEST-AT-Vfl and pBAD/Myc-his-DEST-PA01 using Phusion DNA polymerase according to the manufacturers specifications using primer pairs AT-Vfl for_Ec (AAATTT GGTACC GCTAGGAGGAATTAACCATG)+AT-Vfl_rev_Ec (AAATTT ACTAGT AAGCTGGGTTTACGCGACTTC) and AT-Pa01_for_Ec (AAATTT GGTACC GCTAGGAGGAATTAACCATG)+AT-Pa01_rev_Ec, (AAATTT ACTAGTACAAGAAAGCTGGGTTCAAG) respectively.

[0245] The decarboxylase gene from Lactococcus lactis coding for Lactococcus lactis branched chain alpha-keto acid decarboxylase KdcA (Seq ID NO: 116) was amplified from pBAD/Myc-His-DEST-DC-KdcA by PCR using Phusion DNA polymerase according to the manufacturers specifications and using primers Kdc_for_Ec (AAATTT ACTAGT GGCTAGGAGGAATTACATATG) and Kdc_rev_Ec (AAATTT AAGCTT ATTACTTGTTCTGCTCCGCAAAC). The aminotransferase fragments were digested with KpnI/SpeI and the decarboxylase fragment was digested with SpeI/HindIII. Both fragments were ligated to KpnI/HindIII digested pBBR-lac to obtain pAKP-94 (containing genes encoding AT-PA01 and KdcA) and pAKP-96 (containing genes encoding AT-Vfl and KdcA) respectively.

[0246] Protein Expression and Metabolite Production in E. coli

[0247] Plasmid pAKP-323 (described in Example 2) was co-transformed with pAKP96 to E. coli BL21 for expression. Cultures were grown as described in Example 2. Incubation time was 24 hrs, the medium was M9 minimal medium (see Example 1). Samples were prepared for analysis as described in Example 2 and analysed by LC-MS-MS as described in Example 1.

TABLE 9

| Plasmid | Plasmid | | C- | Culture | Adipate | 6-ACA |
|---|---|---|---|---|---|---|
| 1 | 2 | Fraction | source | condition | [mg/l] | [mg/l] |
| — | — | supernatants | glucose | Shake flask | 0 | 0 |
| pAKP-323 | pAKP-96 | supernatants | glycerol | Shake flask | 0.67 | 0.8 |
| pAKP-323 | pAKP-96 | Cell | glycerol | Shake flask | 3.2 | 2.2 |
| — | — | supernatants | glycerol | 24 wells MTP | 0 | 0 |
| pAKP-323 | pAKP-96 | supernatants | glucose | Shake flask | 5 | 1 |

This Example shows that the E coli naturally has adipate synthesis activity. It is contemplated that increased adipate production can be achieved with an E coli that has not been modified to contain a (heterologous) gene encoding an enzyme for catalysing the converstion of 5-FVA to 6-ACA.

### Example 10

### Construction of an AKP Biosynthetic Pathway from Other Archae Bacteria

[0248] Protein sequences for the Methanosarcina activorans homoaconitase small subunit (AksE, MA3751, [Sequence ID 225]), homoaconitase large subunit (AksD, MA3085, [Sequence ID 237]) and homoisocitrate dehydrogenase (AksF, MA3748, [Sequence ID 249]), homologues thereof from Methanospirillum hungatei JF-1 homoaconitase small subunit (AksE, Mhun_{—}1799, [Sequence ID 228]), homoaconitase large subunit (AksD, Mhun_{—}1800, [Sequence ID 240]) and homoisocitrate dehydrogenase (AksF, Mhun_{—}1797, [Sequence ID 252]), homologues thereof from Methanococcus maripaludis S2 homoaconitase small subunit (AksE, MMP0381, [Sequence ID 207]), homoaconitase large subunit (AksD, MMP1480, [Sequence ID 195]) and homoisocitrate dehydrogenase (AksF, [Sequence ID 222]), homologues thereof from Methanococcus vannielii SB homoaconitase small subunit (AksE, Mevan_{—}1368, [Sequence ID 201]), homoaconitase large subunit (AksD, Mevan_{—}0789, [Sequence ID 189]) and homoisocitrate dehydrogenase (AksF, Mevan_{—}0040 [Sequence ID 216]), and A. vinelandii homocitrate synthase NifV, [Sequence ID 75]) were retrieved from databases.

TABLE 10

| Plasmid ID | Donor organism(s) | NifV | AksD | AksE | AksF |
|---|---|---|---|---|---|
| pAKP-358 | Methanosarcina | Seq ID | Seq ID | Seq ID | Seq ID |
| | acetivorans | 149 | 236 | 224 | 248 |
| | & Azotobacter | | | | |
| | vinelandii | | | | |
| | (NifV) | | | | |
| pAKP-359 | Methanospirillum | Seq ID | Seq ID | Seq ID | Seq ID |
| | hungatei JF-1 & | 149 | 239 | 227 | 251 |
| | Azotobacter | | | | |
| | vinelandii | | | | |
| | (NifV) | | | | |
| pAKP376 | Methanococcus | Seq ID | Seq ID | Seq ID | Seq ID |
| | vannielii SB & | 149 | 188 | 200 | 215 |
| | Azotobacter | | | | |
| | vinelandii | | | | |
| | (NifV) | | | | |
| pAKP378 | Methanococcus | Seq ID | Seq ID | Seq ID | Seq ID |
| | maripaludis S2 & | 149 | 194 | 206 | 221 |
| | Azotobacter | | | | |
| | vinelandii | | | | |
| | (NifV) | | | | |

[0249] Genes encoding the homoaconitase small subunit (AksE), homoaconitase large subunit (AksD) and homoisocitrate dehydrogenase (AksF) were codon pair optimized for E. coli (using methodology described in WO08000632) (table 13). Constructs were made synthetically (Geneart, Regensburg, Germany) containing the optimized genes together with the wild-type nifV gene (Seq ID149) . In the optimization procedure internal restriction sites were avoided and common restriction sites were introduced at the start and stop to allow subcloning in expression vectors. Also, upstream of AksD the sequence of the tac promoter from pMS470 was added. Each ORF was preceded by a consensus ribosomal binding site and leader sequence to drive translation in pMS470. Also, upstream of AksD the sequence of the tac promoter from pMS470 was added. A synthetic AksA/AksF cassette was cut with NdeI/XbaI and a synthetic AksD/AksE cassette was cut with XbaI/HindIII. Fragments containing Aks genes were inserted in the NdeI/HindIII sites of pMS470 to obtain the vectors pAKP-358, pAKP359, pAKP376 and pAKP378.

[0250] Protein Expression and Metabolite Production in E. coli

[0251] Plasmids were transformed to E. coli BL21 for expression. Starter cultures were grown overnight in tubes with 10 ml 2*TY medium. 200 μl culture was transferred to shake flasks with 20 ml 2*TY medium. Flasks were incubated in an orbital shaker at 30° C. and 280 rpm. After 4 h IPTG was added at a final concentration of 0.2 mM and flasks were incubated for 4-16 h at 30° C. and 280 rpm. Cells from 20 ml culture were collected by centrifugation and resuspended in 4 ml M9 medium with a suitable carbon source in 24 well plates. After incubation for 24-72 h at 30-37° C. and 210 rpm cells were collected by centrifugation and pellet and supernatant were separated and stored at −20C for analysis.

[0252] Preparation of Cell Fraction for Analysis

[0253] Cells from small scales growth (see previous paragraph) were harvested by centrifugation. The cell pellets were resuspended in 1 ml of 100% ethanol and vortexed vigorously. The cell suspension was heated for 2 min at 95° C. and cell debris was removed by centrifugation. The supernatant was evaporated in a vacuum dryer and the resulting pellet was dissolved in 200 μl deionized water. Remaining debris was removed by centrifugation and the supernatant was stored at −20° C.

[0254] Analysis of Supernatant and Cell Extract

[0255] Supernatant and extracts from cell fraction were diluted 5 times with water prior to UPLC-MS/MS analysis. Results, shown in Table 14, clearly show presence of AKP and AAP in recombinant strains. It is contemplated that the conversion of AKP to AAP is catalyzed by a natural aminotransferase present in E. coli.

TABLE 11
AKP production with glycerol as carbon source

| Plasmid | Fraction | Carbon source | AKP [mg/l] |
|---|---|---|---|
| — | supernatant | glycerol | n.d. |
| — | cell | glycerol | n.d. |
| pAKP358 | supernatant | glycerol | 21 |
| pAKP359 | supernatant | glycerol | 19 |
| pAKP376 | supernatant | glycerol | 3 |
| pAKP378 | supernatant | glycerol | 650 |

n.d. = not detectible

[0256] Results clearly show presence of AKP in recombinant strains.

### Example 11

### Production of Adipate from AKP in E. coli

[0257] Preparation of Constructs for Co-Expression of Aminotransferases and a Decarboxylases

[0258] Construction of the plasmids encoding enzymes for conversion of AKP to 5-formyl valeric acid (5-FVA) and 5-FVA to 6-ACA was as described in Example 4 whereas the plasmids pAKP94 and pAKP96 were described in example 9. For exchanging the Lactococcus lactis branched chain alpha-keto acid decarboxylase KdcA [SEQ ID No. 115], present in pAKP 94 and pAKP96 with the Zymomonas mobilis pyruvate decarboxylase Pdc1472A [SEQ ID No. 112], and alpha-ketoisovalerate decarboxylase KivD [SEQ ID No. 118], respectively plasmids pBAD-kivD and pBAD-Pdc1472A were digested with Nde1 and HinD3. The 1,6 kb fragment containing the decarboxylase gene was isolated and ligated into the Nde1/HinD3 digested vector pAKP94 yielding pAKP 326 and pAKP327 respectively. Cloning the 1.6 kb Nde1/HinD3 fragments from pBAD-kivD into pAKP96 yielded pAKP330.

[0259] Protein Expression and Metabolite Production in E. coli

[0260] Plasmids were transformed to E. coli BL21 for expression. Starter cultures were grown overnight in tubes with 10 ml 2*TY medium. 200 μl culture was transferred to shake flasks with 20 ml 2*TY medium. Flasks were incubated in an orbital shaker at 30° C. and 280 rpm. After 4 h IPTG was added at a final concentration of 0.2 mM and flasks were incubated for 4 h at 30° C. and 280 rpm. Cells from 20 ml culture were collected by centrifugation and resuspended in 4 ml 2×TY medium with 1% glycerol and 500 mg/l AKP in 24 well plates. After incubation for 48 h at 30° C. and 210 rpm cells were collected by centrifugation and pellet and supernatant were recated and stored at −20C for analysis.

TABLE 12
adipate production in E. coli

| | | | mg/l | mg/l |
|---|---|---|---|---|
| plasmid | aminotransferase | Decarboxylase | adipate | 6-ACA |
| pAKP326 | PA01 | kivD | 16 | 21 |
| pAKP327 | PA01 | pdcl472A | 22 | 20 |
| pAKP330 | Vfl | kivD | 18 | 17 |

Results clearly show presence of adipate and 6-ACA in recombinant strains. It is contemplated that the conversion of 5-FVA to adipate is catalyzed by a natural aldehydedehydrogenases present in E. coli

### Example 12

### Identification of Aldehydedehydrogenases Involved in the Conversion of 5-FVA to Adipate

[0261] Construction of pAKP362

[0262] For the introduction of a plasmid containing genes encoding the aminotransferase gene from Vibrio fluvialis JS17 (AT-Vfl) and the decarboxylase gene coding for branched chain alpha-keto acid decarboxylase KdcA from Lactococcus lactis (Dc-kdcA) in mutants of the E. coli KEIO collection plasmid pAKP 362 was constructed. Therefore, the cat gene, encoding the chloramphenicol acetyltransferase enzyme, was PRC amplified from the E. coli plasmid pACYC (as described in WO 2009/113853) using the primers Fw_BstB1 (AATCGACCGACCTGTCGCATCACCCGACGCACTTTGCGCCG) and rev_Drd1 (CTGCTTCGAACCCTGTGGAACACCTACATCTGTAT). This fragment was digested with BstB1 and Drd1 and ligated into plasmid pAKP96 previously digested with BstB1 and Drd1.

[0263] Protein Expression and Metabolite Production in E. coli

[0264] Genes encoding enzymes having catalytic activity with respect to the conversion of 5-formyl valeric acid (5-FVA) to adipate were identified by testing putative enzymes for said activity. Plasmid pAKP362 was introduced into the E. coli strains mutated in these genes (i.e. which genes were deleted) as identified in the E. coli KEIO mutant library (Baba T, Ara T, et al. (2006)).

[0265] Construction of Escherichia coli K-12 in-frame, single-gene knockout mutants: the Keio collection. Mol Syst Biol doi:10.1038/msb400050.), a collection of strains with single knock out mutations in known genes. Cultures were grown overnight in tubes with 10 ml 2*TY medium. 200 μl culture was transferred to shake flasks with 20 ml 2*TY medium. Flasks were incubated in an orbital shaker at 30° C. and 280 rpm. After 4 h IPTG was added at a final concentration of 0.1 mM and flasks were incubated for 4 h at 30° C. and 280 rpm. Cells from 10 ml culture were collected by centrifugation and resuspended in 2.5 ml 2×TY medium with 1% glycerol and 500 mg/l AKP. After incubation in 24 well plates for 24-48 h at 37° C. and 210 rpm the supernatant was collected by centrifugation and stored at −20C for analysis. Samples were analysed by LC-MS-MS as described in Example 2. The resulsts are shown in Table 13.

TABLE 13

| | Gene | Annotation | Seq ID | Seq ID | | Adipate | 6-ACA |
|---|---|---|---|---|---|---|---|
| Strain | Mutated | mutated gene | (DNA) | (protein) | Accession | mg/l | mg/l |
| eAKP474 | — | | | | | 33 | 11 |
| eAKP466 | GabD | succinate-semialdehyde | 284 | 285 | NP_417147 | 10 | 8 |
| | | dehydrogenase | | | | | |
| | | (EC 1.2.1.16) | | | | | |
| eAKP452 | B1444 | putative aldehyde | 286 | 287 | NP_415961 | 16 | 9 |
| | | dehydrogenase | | | | | |
| | | (1.2.1.8) | | | | | |

[0266] From these data it is clear that although in these mutants the level of 6-ACA production is hardly affected the levels of adipate are severely reduced. Thus it is concluded the enzymes comprising a sequence as identified in Seq ID NO 285 and in Seq ID NO 287 catalyse the formation of adipate.

The application's sequence listing, which the Patent Office published only in electronic form, follows.

SEQUENCE LISTING (291 sequences)

SEQ ID NO: 1 - DNA, 1362 bp, Vibrio fluvialis
  CDS (1)..(1362)
atgaacaaaccgcaaagctgggaagcccgggccgagacctattcgctctatggtttcaccgacatgccttcgctgcatcagcgcggcacggtcgtcgtgacccatggcgagggaccctatatcgtcgatgtgaatggccggcgttatctggacgccaactcgggcctgtggaacatggtcgcgggctttgaccacaaggggctgatcgacgccgccaaggcccaatacgagcgttttcccggttatcacgcctttttcggccgcatgtccgatcagacggtaatgctgtcggaaaagctggtcgaggtgtcgccctttgattcgggccgggtgttctatacaaactcggggtccgaggcgaatgacaccatggtcaagatgctatggttcctgcatgcagccgagggcaaaccgcaaaagcgcaagatcctgacccgctggaacgcctatcacggcgtgaccgccgtttcggccagcatgaccggcaagccctataattcggtctttggcctgccgctgccgggctttgtgcatctgacctgcccgcattactggcgctatggcgaagagggcgaaaccgaagagcagttcgtcgcccgcctcgcccgcgagctggaggaaacgatccagcgcgagggcgccgacaccatcgccggtttctttgccgaaccggtgatgggcgcgggcggcgtgattcccccggccaagggctatttccaggcgatcctgccaatcctgcgcaaatatgacatcccggtcatctcggacgaggtgatctgcggtttcggacgcaccggtaacacctggggctgcgtgacctatgactttacacccgatgcaatcatctcgtccaagaatcttacagcgggctttttccccatgggggcggtgatccttggcccggaactttccaaacggctggaaaccgcaatcgaggcgatcgaggaattcccccatggctttaccgcctcgggccatccggtcggctgtgctattgcgctgaaagcaatcgacgtggtgatgaatgaagggctggctgagaacgtccgccgccttgccccccgtttcgaggaaaggctgaaacatatcgccgagcgcccgaacatcggtgaatatcgcggcatcggcttcatgtgggcgctggaggctgtcaaggacaaggcaagcaagacgccgttcgacggcaacctgtcggtcagcgagcgtatcgccaatacctgcaccgatctggggctgatttgccggccgcttggtcagtccgtcgtcctttgtccgccctttatcctgaccgaggcgcagatggatgagatgttcgataaactcgaaaaagcccttgataaggtctttgccgaggttgcctga

SEQ ID NO: 2 - protein, 453 aa, Vibrio fluvialis
MNKPQSWEARAETYSLYGFTDMPSLHQRGTVVVTHGEGPYIVDVNGRRYLDANSGLWNMVAGFDHKGLIDAAKAQYERFPGYHAFFGRMSDQTVMLSEKLVEVSPFDSGRVFYTNSGSEANDTMVKMLWFLHAAEGKPQKRKILTRWNAYHGVTAVSASMTGKPYNSVFGLPLPGFVHLTCPHYWRYGEEGETEEQFVARLARELEETIQREGADTIAGFFAEPVMGAGGVIPPAKGYFQAILPILRKYDIPVISDEVICGFGRTGNTWGCVTYDFTPDAIISSKNLTAGFFPMGAVILGPELSKRLETAIEAIEEFPHGFTASGHPVGCAIALKAIDVVMNEGLAENVRRLAPRFEERLKHIAERPNIGEYRGIGFMWALEAVKDKASKTPFDGNLSVSERIANTCTDLGLICRPLGQSVVLCPPFILTEAQMDEMFDKLEKALDKVFAEVA

SEQ ID NO: 3 - DNA, 1362 bp, Artificial
  Vibrio fluvialis JS17 omega-aminotransferase codon optimised gene
atgaataaaccacagtcttgggaagctcgtgctgaaacctatagcctgtacggctttaccgatatgccgtctctgcaccagcgtggtactgtagtggtaacgcacggtgagggcccgtacatcgtggacgttaatggccgccgttacctggatgcaaacagcggcctgtggaacatggttgcgggcttcgaccacaaaggcctgatcgatgccgcaaaagcgcagtacgaacgcttcccgggttatcacgcgttctttggccgtatgagcgaccagactgtgatgctgagcgaaaaactggttgaagtgtccccgttcgatagcggtcgtgtcttttacactaactctggcagcgaggctaacgataccatggttaagatgctgtggttcctgcacgcagcggaaggcaaacctcagaaacgtaaaattctgacccgttggaacgcttatcacggtgtgactgctgtttccgcatctatgaccggtaaaccgtataacagcgtgttcggtctgccgctgcctggcttcgtgcatctgacctgcccgcactactggcgttatggtgaggaaggcgaaactgaggaacagttcgtggcgcgtctggctcgtgaactggaagaaaccattcaacgcgaaggtgcagatactatcgcgggcttctttgcggagcctgttatgggtgccggcggtgtgattccgccggcgaagggctatttccaggcaatcctgccgatcctgcgcaagtacgacattccggttatttctgacgaagtgatctgcggcttcggccgcaccggtaacacctggggctgcgtgacgtatgacttcactccggacgcaatcattagctctaaaaacctgactgcgggtttcttccctatgggcgccgtaatcctgggcccagaactgtctaagcgcctggaaaccgccatcgaggcaatcgaagagttcccgcacggtttcactgctagcggccatccggtaggctgcgcaatcgcgctgaaggcgatcgatgttgtcatgaacgagggcctggcggaaaacgtgcgccgcctggcgccgcgttttgaagaacgtctgaaacacattgctgagcgcccgaacattggcgaatatcgcggcatcggtttcatgtgggccctggaagcagttaaagataaagctagcaagaccccgttcgacggcaacctgtccgtgagcgaacgtatcgctaatacctgtacggacctgggtctgatctgccgtccgctgggtcagtccgtagttctgtgcccaccatttatcctgaccgaagcgcagatggatgaaatgttcgataaactggagaaagctctggataaagtgttcgctgaagtcgcgtaa

SEQ ID NO: 4 - protein, 406 aa, Methanococcus jannaschii DSM2661
MTKVLVMFMDFLFENSWKAVCPYNPKLDLKDIYIYDTTLRDGEQTPGVCFTKEQKLEIARKLDELGLKQIEAGFPIVSEREADIVKTIANEGLNADILALCRALKKDIDKAIECDVDGIITFIATSPLHLKYKFNNKSLDEILEMGVEAVEYAKEHGLFVAFSAEDATRTPIEDLIKVHKAAEEAGADRVHIADTTGCATPQSMEFICKTLKENLKKAHIGVHCHNDFGFAVINSIYGLIGGAKAVSTTVNGIGERAGNAALEELIMALTVLYDVDLGLNLEVLPELCRMVEEYSGIKMPKNKPIVGELVFAHESGIHVDAVIENPLTYEPFLPEKIGLKRNILLGKHSGCRAVAYKLKLMGIDYDREMLCEIVKKVKEIREEGKFITDEVFKEIVEEVLRKRNKN

SEQ ID NO: 5 - protein, 391 aa, Methanothermobacter thermoautotrophicum DH
MRYFVSPFNKEAELKFPDRITIYDTTLRDGEQTPGVCLGTEEKLEIARKLDELGIHQIESGFPVVSEQERVSVKSIANEGLNAEILALCRTKKDDIDAAIDCDVDGVITFMATSDLHLKHKLKLTREEALNVCMNSIEYAKDHGLFLAFSAEDATRTDLDFLKQIYRKAENYGADRVHIADTVGAISPQGMDYLVRELRRDIKVDIALHCHNDFGMALSNSIAGLLAGGTAVSTTVNGIGERAGNTSLEELIMALRIIYEVDLGFNIGVLYELSRLVEKHTRMKVPENKPIVGRNVFRHESGIHVDAVIEEPLTYEPFLPEMIGHQRKIVLGKHSGCRAVKAKLEEYGIDVTRDELCRIVEEVKKNREKGKYINDELFYRIVKSVRGPVDF

SEQ ID NO: 6 - protein, 386 aa, Methanococcus maripaludis S2
MDWKAVSPYNPKLDLKDCYLYDTTLRDGEQTPGVCFAGDQKLEIAKKLDELKIKQIEAGFPIVSENERKAIKSITGEGLNAQILALSRVLKEDIDKAIECDVDGIITFIATSPMHLKYKLHKNLDEVEEMGMKAVEYAKDHGLFVAFSAEDATRTPLEDIIRIHKNAEEHGADRVHIADTLGCATPQAMYHICSELSKHLKKAHIGVHCHNDFGFAVINSIYGLIGGAKAVSTTVNGIGERAGNAAIEEIAMALKVLYDHDMGLNTEILTEISKLVENYSKIKIPENKPLVGEMVFYHESGIHVDAVLENPLTYEPFLPEKIGQKRKIILGKHSGCRAVAHRLQELGLEASRDELWEIVKKTKETREDGTEISDEVFKNIAEKIIK

SEQ ID NO: 7 - protein, 386 aa, Methanococcus maripaludis C5
MDWKAVSPYNPKLNLKDCYLYDTTLRDGEQTPGVCFTHDQKLEIAKKLDELKIKQIEAGFPIVSENERKAIKSITGEGLNAQILALSRVLKEDIDKAIECDVDGIITFIAASPMHLKYKLHKSLDEVEEMGMKAVEYAKDHGLFVAFSAEDATRTPVEDLIRIHKNAEEHGANRVHIADTLGCATPQAMYHICSELSSNLKKAHIGVHCHNDFGFAVINSIYGLIGGAKAVSTTVNGIGERAGNAAIEEIVMALKVLYDHDMGLNTEILTEISKLVENYSKIRIPENKPLVGEMAFYHESGIHVDAVLENPLTYEPFLPEKIGQKRKIILGKHSGCRAVAHRLQELGLEASREELWEIVKKTKETREEGTEISDEVFKNIVDKIIK

SEQ ID NO: 8 - protein, 386 aa, Methanococcus maripaludis C7
MDWKAVSPYNPKLDLKDCYLYDTTLRDGEQTPGVCFTHDQKLEIAKKLDELKIKQIEAGFPIVSENERKCIKSITGEGLNAQILALSRVLKEDIDKAIECDVDGIITFIAASPMHLKYKLHKSLDEVEEMGMKAVEYAKDHGLFVAFSAEDATRTPIEDIIRIHKNAEEHGADRVHIADTLGCATPQSMYYICSELSKHLKKAHIGVHCHNDFGFAVINSIYGLLGGAKAVSTTVNGIGERAGNAAIEEIVMALKVLYDYDMGLNTEILTEMSKLVEKYSKIRIPENKPLVGEMAFYHESGIHVDAVLENPLTYEPFLPEKIGQKRKIILGKHSGCRAVAHRLQELGLETSRNELWEIVKKTKETREEGTEISDEVFKNIVDKIIK

SEQ ID NO: 9 - protein, 279 aa, Methanosphaera stadtmanae DSM 3091
MGLSDLHLEVKINKPRDVVNQICMDAIDYGKDHGLFVAFSAEDATRTELPKLLDVYKQAQDHGADRIHIADTTGSINPYATQYLVKNIKKEIDTEIALHCHNDFGFAVANSIAGLFEGATAISTTVNGIGERAGNASLEELIMSLKLLYNKDLGFKTEVIYELSQLVSKYSKIPISDSKAIVGNNVFRHESGIHVDAIVKNPLAYEPFIPEMIGTKRQIVLGKHSGKSAVIEKLDTLNIKVDDTQLSQIVSLVKQERERGEEITNNKFDEILEKVNIKR

SEQ ID NO: 10 - protein, 397 aa, Methanopyrus kandleri AV 19
MQSPYVREAVREMDLPDEVIVYDTTLRDGEQTPGVSFTPEQKLEIAHLLDELGVQQIEAGFPVVSEGERDAVRRIAHEGLNADILCLARTLRGDVDAALDCDVDGVITFIATSELHLKHKLRMSREEVLERIADTVEYAKDHGLWVAFSAEDGTRTEFEFLERVYRTAEECGADRVHATDTVGVMIPAAMRLFVAKIREVVDLPIGVHCHDDFGMAVANSLAAVEAGAQAISTTVNGIGERAGNAALEEVIMALKELYGIDPGFNTEVLAELSRKVSEYSGIDVPPNKAVVGENAFRHESGIHVAAVLEEPRTYEPIDPKEVGMNRKIVLGKHTGRKAVVAKLEELGVEPEEEIVEEVLKRIKALGDRRVRVTDSKLEEIVRNVLESRGDRDDPGSR

SEQ ID NO: 11 - protein, 390 aa, Methanobrevibacter smithii ATCC35061
MQYYISHYNKEPELNFPDEITVYDTTLRDGEQTPGVCFSPEEKLEIAKKLDEVKIKQIEAGFPIVSKKEQESVKAITSEGLNAQIISLSRTKKEDIDAALDCDVDGVITFMGTSDIHLEHKMHIGRQEALNTCMNAIEYAKDHGLFVAFSAEDATRTDLDFLKRIYNKAESYGADRVHIADTTGAITPQGITYLVKELKKDVNIDIALHCHNDFGLAVINSISGVLAGANGISTTVNGIGERAGNASLEEVIMSLKLLYGKDLGFKTKHIKELSELVSKASGLPVPYNKPVVGNNVFRHESGIHVDAVIEEPLCYEPYIPELVGQKRQLVLGKHSGCRAVRAKLNECDLDVSDDTLIEIVKKVKKSREEGTYINDDVFKEIVKSCNYKKE

SEQ ID NO: 12 - protein, 386 aa, Methanococcus vannielii SB
MDWKEVSQYNPKLDLKECYVYDTTLRDGEQTPGVCFTGNQKLEIAKKLDDLGIKQIEAGFPTVSENERKCIKSISSEGLNADILALSRVLKEDIDRAIECDVDGIITFVATSPMHLKYKLHKSFEEVEEMGMKAIEYAKDHGLFVAFSAEDATRTSIENIIKIHKNAEDYGADRVHIADTLGCATPQSMYQICSELNKSLKKAHIGVHCHNDFGFAAINSIYGLMGGAKAVSTTVNGIGERAGNAALEEVVMALKVLYNYDMGLNTELIMETSKLVETYSKIKVPENKPLVGEMVFYHESGIHVDAVLENPLTYEPFLPEKIGQKRKIVLGKHSGCRAVAYRLNELGFEATRDELWEIVKKTKETREQGTEISDEVFKNIVTHILN

SEQ ID NO: 13 - protein, 387 aa, Methanococcus aeolicus Nankai 3
MNWKEVCQYNPKLNLEDCYIYDTTLRDGEQTPGVCFSMEQKLDIAKKLDELGVKQIEAGFPAVSKSEIENVKKIANEGLNAEILALSRALQGDIDKALSCDVDGIITFIAASPLHLKYKLHKSIEEVEEMGMKAVEYAKDHGLFVAFSAEDATRTPIEDLVRIHKNAEEHGADRVHIADTTGCGTPQSIQYICSELSNNLKKAHIGVHCHNDFGLAVINSIYGLLGGAKAASTTVNGIGERAGNAPLEELLLTMNVLYDVKTDLNISIIKELSTMVENYSGIKIPVNKPIVGDKVFYHESGIHVDAVIENPLTYEPFLPERIGQKREIVLGKHSGCSAVESKLKELGLEVPKDRIWDLVKKVKTTREGGEDIDDEMFIKIVDIINKQ

SEQ ID NO: 14 - protein, 420 aa, Methanococcus jannaschii DSM2661
MTLVEKILSKKVGYEVCAGDSIEVEVDLAMTHDGTTPLAYKALKEMSDSVWNPDKIVVAFDHNVPPNTVKAAEMQKLALEFVKRFGIKNFHKGGEGICHQILAENYVLPNMFVAGGDSHTCTHGAFGAFATGFGATDMAYIYATGETWIKVPKTIRVDIVGKNENVSAKDIVLRVCKEIGRRGATYMAIEYGGEVVKNMDMDGRLTLCNMAIEMGGKTGVIEADEITYDYLKKERGLSDEDIAKLKKERITVNRDEANYYKEIEIDITDMEEQVAVPHHPDNVKPISDVEGTEINQVFIGSCTNGRLSDLREAAKYLKGREVHKDVKLIVIPASKKVFLQALKEGIIDIFVKAGAMICTPGCGPCLGAHQGVLAEGEICLSTTNRNFKGRMGHINSYIYLASPKIAAISAVKGYITNKLD

SEQ ID NO: 15 - protein, 428 aa, Methanothermobacter thermoautotrophicum DH
MVKMNMTEKILAEAAGLREVTPGEIIEARVDLAMTHDGTSPPTIRTFRDIASRGGPARVWDPERIVMVFDHNVPANTIGAAEFQRVTREFAREQGIVNIFQNAAGICHQVLPERGFVRPGMVIVGADSHTCTYGAFGAFATGMGATDMAMVFATGKTWFMVPEAMRIEVTGEPEGHVYAKDVILHIIGEIGVDGATYRSVEFTGDTIESMDVSGRMTICNMAVEMGAKNGIMEPNRQTLDYVRARTGREFRVYSSDEDSQYLEDHHFDVSDLEPQVACPDDVDNVYPVHRVEGTHIDEAFLGSCTNGRYEDLKIAAEVIGDRRVHEDVRFIVSPASREIYLKALEDGIIETFIRAGAIVCNPGCGPCLGAHMGVLAPGEVSIATTNRNFRGRMGDPASSVYLANPAVVAESAIEGVISAPQQEAGNGC

SEQ ID NO: 16 - protein, 418 aa, Methanococcus maripaludis S2
MTLAEKIISKNVGKNVYAKDSVEISVDIAMTHDGTTPLTVKAFEQISDKVWDNEKIVIIFDHNIPANTSKAANMQVITREFIKKQGIKNYYLDGEGICHQVLPEKGHVKPNMIIAGADSHTCTHGAFGAFATGFGATDMGYVYATGKTWLRVPETIRVNVTGENENISGKDIILKTCKEVGRRGATYMSLEYGGNAVHNLSMDERMVLSNMAIEMGGKAGIIEADDTTYRYLENAGVSREEILELKKNKITVDESEEDYYKTIEFDITGMEEQVACPHHPDNVKGVSEVEGTELNQVFIGSCTNGRLNDLRIAAKYLKGKKVNENTRLIVIPASKSIFKEALNEGLIDIFVDSGALICTPGCGPCLGAHQGVLGDGEVCLATTNRNFKGRMGNTNAQVYLSSPKIAAKSAVKGYITNE

SEQ ID NO: 17 - protein, 418 aa, Methanococcus maripaludis C5
MTLAEKIISKNVGKNVYAGDSVEIDVDVAMTHDGTTPLTVKAFEQISDKVWDNEKIVIIFDHNIPANTSKAANMQVITREFIKKQGIKNYYLDGEGICHQVLPEKGHVKPNMIIAGADSHTCTHGAFGAFATGFGATDMGYVYATGKTWLRVPETIQVNVTGENENISGKDIILKTCKEVGRRGATYLSLEYGGNAVQNLDMDERMVLSNMAIEMGGKAGIIEADDTTYKYLENAGVSREEILNLKKNKIKVNESEENYYKTFEFDITDMEEQIACPHHPDNVKGVSEVSGIELDQVFIGSCTNGRLNDLRIAAKHLKGKKVNESTRLIVIPASKSIFKEALKEGLIDTFVDSGALICTPGCGPCLGAHQGVLGDGEVCLATTNRNFKGRMGNTKSEVYLSSPAIAAKSAVKGYITNE

SEQ ID NO: 18 - protein, 418 aa, Methanococcus maripaludis C7
MTLAEKIISKNVGKNVYAGDSVEIDVDIAMTHDGTTPLTVKAFEQISDKVWDNEKIVIIFDHNIPANTSKAANMQVITREFIKKHGIKNYYLDGEGICHQVLPEKGHVKPNMIIAGADSHTCTHGAFGAFATGFGATDMGFVYATGKTWLRVPETIRVNVTGENENISGKDIILKTCKEVGRSGATYMSLEYGGNAVQNLEMNERMVLSNMAIEMGGKAGIIEADDTTYKYLENAGVSREEILNLKKNKITVNESEENYYKTIEFDITDMEEQIACPHNPDNVKGVSEVSGTELDQVFIGSCTNGRLNDLRIAAKYLKGKKVNENTRLIVIPASKSIFAGALKEGLIDIFVESGALICTPGCGPCLGAHQGVLGDGEVCLATTNRNFKGRMGNTKAEVYLSSPKIAAKSAVKGYITNE

SEQ ID NO: 19 - protein, 415 aa, Methanosphaera stadtmanae DSM 3091
MNISEKILAKASNKEEVSPGDTITANIDVAMSHDGTSPPTIKVFEKIADKVWDPEKIVLVFDHVIPANTIGSAEFQQVVREFGKKQKIPNMYIQGEGVCHEVLPDYGHVKPSTVIVGADSHTCTYGAFGAFSTGLGATDLAMVYATGQTWFNVPESLKINVNGTLNENVYSKDVILKIIKELGAYGATYKSLEFHGDTIDNMSVASRLTMTNMAIECGAKNGIMVPNKQTKEYLSQRGITDYTITTASKDAEYEKIYDFDVDDLQPQIACPHNVDNVEDIDKVAGTHIDQAVLGSCTNGRYEDLLQAAEVIEGHKIHEDVELLVFPASRHVYEKAIETGVIQTLLKSNAIICNPGCGPCLGAHMGVMTDDMTCISTTNRNFLGRMGSAKSYVYLSNPAVVAASAIKGEITNPSEI

SEQ ID NO: 20 - protein, 418 aa, Methanopyrus kandleri AV19
MGKTMAEKILSRASGEDAEAGDIVVANIDVAMVHDITGPITVQRLEEMGVERVWDPSKIVVLFDHQVPADSVEAAENHKIMREFVEEQGIEHFYDVREGVCHQVLPEKGHVRPGDVIVGADSHTCTHGALGAFATGIGSTDMAAVFATGKLWFRVPETYRVEITGELPEGVYAKDVVLKVTGEIGADGATYMAIEYHGEVVREMSVSDRMCLCNMAIEMGAKTGMVPPDEKTLEYVKKRAGTEGRPVEPDPDARYEAELTLDVSDLEPQVAKPFSPDNVVPVGEVEGIAIDQVFIGSCTNGRYEDLKVAAEVLEGEEVHDDVRLIVIPASREVYHRTLKDGVLEVLHEAGALICPPNCGPCLGGHMGVLAEGERCVATSNRNFPGRMGHRESEVYLASPATAAASAIEGEITDPRPYL

SEQ ID NO: 21 - protein, 417 aa, Methanobrevibacter smithii ATCC35061
MNITEKILSAKAKKEVTPGEIIEIPVDLAMSHDGTSPPAIKTFEKVATKVWDNEKIAIVFDHNVPANTIGSAEFQKVCRDFIKKQKITKNYIHGDGICHQVLPEKGLVEPGKVIVGADSHTCTYGAYGAFSTGMGATDLAMVYATGKTWFMVPEAIKMEVSGELNSYTAPKDIILKIIGEVGIAGATYKTAEFCGETIEKMGVEGRATICNMAIEMGAKNGIMEPNKEVIQYVSQRTGKKESELNIVKSDEDAQYSEEMHFDITDMEPQIACPNDVDNVKDISKVEGTAVDQCLIGSCTNGRLSDLKDAYEILKDNEINNDTRLLILPASAEIYKQAIHEGYIDAFIDAGAIICNPGCGPCLGGHMGVLSEGETCLSTTNRNFKGRMGDPKSSVYLANSKVVAASAIEGVITNPKDL

SEQ ID NO: 22 - protein, 418 aa, Methanococcus vannielii SB
MTLAEAILSKKLGKNVYAKDSVEIDVDLAMTHDGTTPLTVKAFEEISDRVFDNKKIVIVFDHNIPANTSKAANMQIITRDFIKKHDIKNYYLDGEGICHQILPEKGHVKPNMVIVGADSHTCTHGAFGAFATGFGASDMGYVYATGKTWFRVPETIRVNVTGKNENISGKDIVLKTCKEVGRSGATYMALEYGGSAVKALNMDERMVLCNMAIEMGGKVGLIEADHTTYDYLKNAGVSNQEIAELQRNKISITENEETYFKTVEFDITDMEEQVACPHHPDNVKGISEVLGTPIDQIFIGSCTNGHIGDLRIAAKILKGKSINKNTRLIVIPASKSILKQALNEGLIDIFVDFGALICAPGCGPCLGAHEGVLGDGEVCLATTNRNFKGRMGNINSEVYLSSPAIAAKSAIKGHITNE

SEQ ID NO: 23 - protein, 421 aa, Methanococcus aeolicus Nankai 3
MTLAEEILSKKVGKKVKAGDVVEIDIDLAMTHDGTTPLSAKAFKQITDKVWDNKKIVIVFDHNVPANTLKAANMQKITREFIKEQNIINHYLDGEGVCHQVLPENGHIQPNMVIAGGDSHTCTYGAFGAFATGFGATDMGNIYATGKTWLKVPKTIRINVNGENDKITGKDIILKICKEVGRSGATYMALEYGGEAIKKLSMDERMVLSNMAIEMGGKVGLIEADETTYNYLRNVGISEEKILELKKNQITIDENNIDNDNYYKIINIDITDMEEQVACPHHPDNVKNISEVKGAPINQVFIGSCTNGRLNDLRIASKYLKGKKVHNDVRLIVIPASKSIFKQALKEGLIDIFVDAGALICTPGCGPCLGAHQGVLGDGEVCLATTNRNFKGRMGNTTAEIYLSSPAIAAKSAIKGYITNE

SEQ ID NO: 24 - protein, 170 aa, Methanococcus jannaschii DSM2661
MIIKGRAHKFGDDVDTDAIIPGPYLRTTDPYELASHCMAGIDENFPKKVKEGDVIVAGENFGCGSSREQAVIAIKYCGIKAVIAKSFARIFYRNAINVGLIPIIANTDEIKDGDIVEIDLDKEEIVITNKNKTIKCETPKGLEREILAAGGLVNYLKKRKLIQSKKGVKT

SEQ ID NO: 25 - protein, 170 aa, Methanothermobacter thermoautotrophicum DH
MEGIIRGRVWRFGDNVDTDMIIPGRYLRTFSLDELASHVMEGARPEFASQVRKGDIIVAGRNFGCGSSREQAPVALKHAGVVAIIAESFARIFYRNAINIGLPVIMAKVDADDGDEVSIDLRSGQIRNLTAGSEYRMKPFNDYMLSILEDGGLVNHYLKTIDTGISGDEG

SEQ ID NO: 26 - protein, 161 aa, Methanococcus maripaludis S2
MKITGKVHLFGDDIDTDAIIPGAYLKTTDEYELASHCMAGIDENFPERVEDGDFLVAGENFGCGSSREQAPIAIKYCGIKAIIVESFARIFYRNCINLGVFPIECKGISKHVKDGDVIELDLEEKKVILKDTVLDCNLPTGTAKDIMDEGGLINYAKKQKN

SEQ ID NO: 27 - protein, 161 aa, Methanococcus maripaludis C5
MKITGKVHVFGDDIDTDAIIPGAYLKTTDEYELASHCMAGIDEDFPEMVKEGDFLVAGENFGCGSSREQAPIAIKYCGIKAIIVESFARIFYRNCINLGVFPIECKGISKHVKDGDLIELDLENKKVILKDKVLDCHIPTGTAKDIMDEGGLINYAKKQKN

SEQ ID NO: 28 - protein, 161 aa, Methanococcus maripaludis C7
MKITGKVHLFGDDVDTDAIIPGAYLKTTDEYELASHCMAGIDEDFPEMVEEGDFLVAGENFGCGSSREQAPIAIKYCGIKAIIVESFARIFYRNCINLGVFPIECKGISKHVKDGDSIELDLENKKVILKDTVLNCHLPTGTAKEIMDEGGLINYAKKHKN

SEQ ID NO: 29 - protein, 163 aa, Methanosphaera stadtmanae DSM 3091
MDSMKGKVWTFRDCIDTDVIIAGRYLRTFNPEDLAAHVMEAEDPEFSSKVGKGDIIVGGWNFGCGSSREQAPVAIKTAGVSAVIAKSFARIFYRNAINIGLPVITADIEVDEGDILEVNIEDGIIINETTKKTFKIKPFDAEMLDILENGGLVNQYLKNKKEV

SEQ ID NO: 30 - protein, 170 aa, Methanopyrus kandleri AV19
MRDVIRGRAWVFGDDIDTDQIIPGRYLTTQDPEELAKHVMEGADPEFPEKVREGDVIVAGKNFGCGSSREHAPIALKAAGIACVVTRSFARIFYRNAINLGLPLVVCPGVDDAFEDGQGIEVNLREGYVRNLDTGEELEAKPLPDFMMRILEAGGLVELIKREGPRAFEG

SEQ ID NO: 31 - protein, 161 aa, Methanobrevibacter smithii ATCC35061
MDIIKGKTWTFGENIDTDVIIPGRYLRTFNPQDLADHVLEGERPDFTKNVKKGDIIVADENFGCGSSREQAPVAIKTAGVDAIVAKSFARIFYRNAINIGLPVIVCDIQAKDGDIINIDLSKGILTNETTGESVTFEPFKEFMLDILEDNGLVNHYLKEKQ

SEQ ID NO: 32 - protein, 161 aa, Methanococcus vannielii SB
MKLKGKAHVFSDDVDTDAIIPGAYLRTTDVYELASHCMAGIDENFPKKVNLGDFIVAGENFGCGSSREQAPISIKYLGISAIIAESFARIFYRNSINLGVIPIECKNISKHVKTGDLIELDLENKKIILKDIVLECTVPTGKAKEIIDLGGLINYAKAQMG

SEQ ID NO: 33 - protein, 165 aa, Methanococcus aeolicus Nankai 3
MIIKGNIHLFGDDIDTDAIIPGAYLKTTDPKELASHCMAGIDEKFSTKVKDGDIIVAGENFGCGSSREQAPISIKHTGIKAVVAESFARIFYRNCINIGLIPITCEGINEQIQNLKDGDTIEIDLQNETIKINSMMLNCGAPKGIEKEILDAGGLVQYTKNKLKK

SEQ ID NO: 34 - protein, 347 aa, Methanococcus jannaschii DSM2661
MMKVCVIEGDGIGKEVIPEAIKILNELGEFEIIKGEAGLECLKKYGNALPEDTIEKAKEADIILFGAITSPKPGEVQNYKSPIITLRKMFHLYANVRPINNFGIGQLIGKIADYEFLNAKNIDIVIIRENTEDLYVGRERLENDTAIAERVITRKGSERIIRFAFEYAIKNNRKKVSCIHKANVLRITDGLFLEVFNEIKKHYNIEADDYLVDSTAMNLIKHPEKFDVIVTTNMFGDILSDEASALIGGLGLAPSANIGDDKALFEPVHGSAPDIAGKGIANPMASILSIAMLFDYIGEKEKGDLIREAVKYCLINKKVTPDLGGDLKTKDVGDEILNYIRKKLKGY

SEQ ID NO: 35 - protein, 331 aa, Methanothermobacter thermoautotrophicum DH
MYRITVIPGDGIGVEVMEAALHVLQALEIEFEFTHAEAGNECFRRCGDTLPEETLKLVRKADATLFGAVTTVPGQKSAIITLRRELDLFANLRPVKSLPGVPCLYPDLDFVIVRENTEDLYVGDEEYTPEGAVAKRIITRTASRRISQFAFQYAQKEGMQKVTAVHKANVLKKTDGIFRDEFYKVASEYPQMEANDYYVDATAMYLITQPQEFQTIVTTNLFGDILSDEAAGLIGGLGLAPSANIGEKNALFEPVHGSAPQIAGKNIANPTAMILTTTLMLKHLNKKQEAQKIEKALQKTLMRGIMTPDLGGTASTMEMAEAIKEEIVKGE

SEQ ID NO: 36 - protein, 339 aa, Methanococcus maripaludis S2
MRNTPKICVINGDGIGNEVVPETVRVLNELGDFEFIHAHAGYECFKRCGDAIPENTIEIAKESDCILFGSVTTPKPTELKNKSYRSPILTLRKELDLYANIRPTYNFDNLDFVIIRENTEGLYVKKEYYDEKNEVAIAERIISKFGSSRIVKFAFDYAVQNNRKKVSCIHKANVLRVTDGLFLEVFEEMSKHYEKLGIKSDDYLIDATAMYLIRNPQMFDVLVTTNLFGDILSDEAAGLIGGLGMSPSANIGDKNGLFEPVHGSAPDIAGKGISNPIATILSAAMMLDHLKMNKEAEYIRKAVKKTVECKYLTPDLGGNLKTFEVTEKIIESIRSQMIQ

SEQ ID NO: 37 - protein, 339 aa, Methanococcus maripaludis C5
MRNTPKICVINGDGIGNEVIPETVRVLNEIGDFEFIETHAGYECFKRCGDAIPEKTIEIAKESDSILFGSVTTPKPTELKNKPYRSPILTLRKELDLYANIRPTFNFKNLDFVIIRENTEGLYVKKEYYDEKNEVATAERIISKFGSSRIVKFAFDYALQNNRKKVSCIHKANVLRITDGLFLGVFEEISKKYEKLGIVSDDYLIDATAMYLIRNPQMFDVMVTTNLFGDILSDEAAGLIGGLGMSPSANIGDKNGLFEPVHGSAPDIAGKGISNPIATILSAAMMLDHLKINKEAEYIRNAVKKTVECKYLTPDLGGHLKTSEVTEKIIESIKSQMIQ

SEQ ID NO: 38 - protein, 339 aa, Methanococcus maripaludis C7
MRNTPKICVINGDGIGNEVIPETVRVLSEIGDFEFIETHAGYECFKRCGDAIPEKTIEIAKESDSILFGSVTTPKPTELKNKPYRSPILTLRKELDLYANIRPTFNFKDLDFVIIRENTEGLYVKKEYYDEKNEVAIAERVISKFGSSRIVKYAFDYALQNNRKKVSCIHKANVLRITDGLFLEVFEEISKKYEKLGIASDDYLIDATAMYLIRNPQMFDVMVTTNLFGDILSDEAAGLIGGLGMSPSANIGDKNGLFEPVHGSAPDIAGKGISNPIASILSAAMMLDHLNMNKEAECIRNAVKKAVECKYLTPDLGGNLKTSEVTDKIIESIKSQMVQ

SEQ ID NO: 39 - protein, 323 aa, Methanosphaera stadtmanae DSM 3091
MYKITVIPGDGIGQEVMQPTIDILETLNSKFEFIPKEAGKECYQKYDTNLPEETIVQCRESDSTLFGAVTSIPQQKSAIVTLRKELDLYVNQRPIHSYTNPDIDFTIIRENSEGLYSHIEESTGDEAIAIRKITYKASERIINYAFNYALKTEKSKVTASHKANVLPVTDGIFKNTFYKVASNYPTIKSNDYYIDAMAMYLITNPAQFDIIVTTNLFGDILSDEGGGLVGTLGLIPSANIGDKTGLFEPVHGSAPDIAGLNKANPIAMILSSCLMLEYLGLYDDAKRIQNAVEETISESKVKTPDMGGHNNTQDVANNILHRL

SEQ ID NO: 40 - protein, 335 aa, Methanopyrus kandleri AV19
MAYKIAVIPGDGIGPEVIEAALHVIEPLIDAEFVEGEAGDECAEKHGDPLPEDTLELCHEADAILFGAAGETAADVIVRLRQELDLYANIRPVRGFPGLRELTGEPYVRDDVDFVIVRENTEGLYSGIEGRFRDTAYTLRIITEEGTRRIAEVACDLAEERGSNTVTCVHKANVMRETCGLFREVCKEVVESRGLEFEEYYVDAAAMFMITEPERFDVVVTPNMFGDILSDEAAALVGGLGLAPSGNVGDRHGLFEPVHGSAPDIAGKGIANPFATILSAVMMLEWLGEDEAAEAVREAVGEAIREGVVTPDLGGDKKTMEVAEFVREAALNRVQ

SEQ ID NO: 41 - protein, 336 aa, Methanobrevibacter smithii ATCC35061
MSTSNKKDNKYQIAVIPGDGIGKEVMEATISVLDELDVDFDYIYGIAGDECNEEHGTPLPQETIDIVRDSDACLFGAAGETAADVIVKIRQEMKMFANLRPVKSYPNTKSLFENVDFMIVRENTEGLYIADQEEETEDGAIAKRVITREAEERIIDYAFQYAKDNNRTKVTAVHKANVLKKTDGLFKKIFYEVGEKYPDIDTEDFYVDATAMYLVTQPQEFQVVVTTNLFGDILSDEGAGLVGGLGLIPSANIGADGALFEPVHGSAPDIAGQQKANPIAMMLSAIMMLRYLGENDAADKFDAAILKVLSEGKTLTGDLGGSATTMEVAQAVKNAL

SEQ ID NO: 42 - protein, 337 aa, Methanococcus vannielii SB
MGYMPKICVITGDGIGKEVVPETLRVLNEVHDFEYIEAHAGYECFKRCGESIPESTIQTAKNSDSILFGSVTTPKPTELKNKPYRSPILTLRQELDLYANIRPTYNFKDLDFVIIRENTECLYVKREYYDEINEVAIAERIISKKGSERIIKFAFEYARLNNRKKVSCIHKANVLRVTDGLFLEIFEKIAKLYENFGISSNDYLIDATAMYLIKNPYMFDVMVTTNLFGDILSDEAAGLIGGLGMSPSANIGDNLGLFEPVHGSAPDIAGKGISNPIATILSASMMLDHLKMNKKAEIIRNAVKKTINNGYLTPDLGGSLKTSEVVNKVIEFIRDEI

SEQ ID NO: 43 - protein, 343 aa, Methanococcus aeolicus Nankai 3
MKIPKICVIEGDGIGKEVIPETVRILKEIGDFEFIYEHAGYECFKRCGDAIPEKTLKTAKECDAILFGAVSTPKLDETERKPYKSPILTLRKELDLYANVRPIHKLDNSDSSNNIDFIIIRENTEGLYSGVEYYDEEKELAISERHISKKGSKRIIKFAFEYAVKHHRKKVSCIHKSNILRITDGLFLNIFNEFKEKYKNEYNIEGNDYLVDATAMYILKSPQMFDVIVTTNLFGDILSDEASGLLGGLGLAPSANIGDNYGLFEPVHGSAPDIAGKGVANPIAAVLSASMMLYYLDMKEKSRLLKDAVKQVLAHKDITPDLGGNLKTKEVSDKIIEELRKIS

SEQ ID NO: 44 - protein, 440 aa, Saccharomyces cerevisiae
MSENNEFQSVTESTTAPTTSNPYGPNPADYLSNVKNFQLIDSTLREGEQFANAFFDTEKKIEIARALDDFGVDYIELTSPVASEQSRKDCEAICKLGLKAKILTHIRCHMDDARVAVETGVDGVDVVIGTSKFLRQYSHGKDMNYIAKSAVEVIEFVKSKGIEIRFSSEDSFRSDLVDLLNIYKTVDKIGVNRVGIADTVGCANPRQVYELIRTLKSVVSCDIECHFHNDTGCAIANAYTALEGGARLIDVSVLGIGERNGITPLGGLMARMIVAAPDYVRSKYKLHKIRDIENLVADAVEVNIPFNNPITGFCAFTHKAGIHAKAILANPSTYEILDPHDFGMKRYIHFANRLTGWNAIKSRVDQLNLNLTDDQIKEVTAKIKKLGDVRPLNIDDVDSIIKDFHAELSTPLLKPVNKGTDDDNIDISNGHVSKKAKVTK

SEQ ID NO: 45 - protein, 428 aa, Saccharomyces cerevisiae
MTAAKPNPYAAKPGDYLSNVNNFQLIDSTLREGEQFANAFFDTEKKIEIARALDDFGVDYIELTSPVASEQSRKDCEAICKLGLKAKILTHIRCHMDDAKVAVETGVDGVDVVIGTSKFLRQYSHGKDMNYIAKSAVEVIEFVKSKGIEIRFSSEDSFRSDLVDLLNIYKTVDKIGVNRVGIADTVGCANPRQVYELIRTLKSVVSCDIECHFHNDTGCAIANAYTALEGGARLIDVSVLGIGERNGITPLGGLMARMIVAAPDYVKSKYKLHKIRDIENLVADAVEVNIPFNNPITGFCAFTHKAGIHAKAILANPSTYEILDPHDFGMKRYIHFANRLTGWNAIKARVDQLNLNLTDDQIKEVTAKIKKLGDVRSLNIDDVDSIIKNFHAEVSTPQVLSAKKNKKNDSDVPELATIPAAKRTKPSA

SEQ ID NO: 46 - protein, 393 aa, Kluyveromyces lactis
MSVNSNPYAPSPNDLLSNVCNFQLIESTLREGEQFASAFFSTEKKIEIAKALDDFGVDYIELTSPVASEQSRSDCEAICKLGLKAKILTHIRCHMDDARVAVETGVDGVDVVIGTSKFLREYSHGKDMNYIAKSAIEVIEFVKSKGLEIRFSSEDSFRSDIVDLLNIYKTVDKIGVNRVGIADTVGCANPRQVYELVRTLKSVVSCDIECHFHDDTGCAIGNSYSALEAGARLIDVSVLGIGERNGITSLGGLMARMIVSAPEYVKSKYKLHKLRDLENLVADAVSVNVPFNNPITGFCAFTHKAGIHAKAILANPSTYEILNPEDFGMKRYIHFANRLTGWNAIKSRVEQLNLHLSDDQIKEVTSKIKQIGDVRQLSIEDVDTIIKDYHSEL

SEQ ID NO: 47 - protein, 490 aa, Phanerochaete chrysosporium
  misc_feature (62)..(62): Xaa can be any naturally occurring amino acid
LSILVAIQKLEPCCKMCPHANGDSTPNDPSQMVPVDLSNGTSHQASVQSNSNGHAATNGAAXNPYAPRASDFLSNVSNFKIIESTLREGEQFANAFFDTKTKIAIAKALDAFGVEYIELTSPAASEQSRRDCEAICKLGLKAKILTHIRCHMDDARIAVETGVDGVDVVIGTSSFLREFSHGKDMAYITKTAIEVIEFVKSKGIEVRFSSEDSFRSDLVDLLSIYQTVDKIGVNRVGIADTVGCANPRQVYDLVRTLRGVVKCDIEIHLHNDTGMAIANAYTALEAGATHIDTSVLGIGERVGITPLGGLVACLYAANPEYVKSKYNLPMLREIENLVAEAVEVNIPFMNPITGYCAFTHKAGIHAKAILNNPSTYEILKPEDFGLTRYVSIGHRLTGWNAVKSRVEQLGLKLTDEEIKDVTAKIKELADVRTQSMDDVDTLLRVYHSGIQSGELAAGQREALDRLLRKHREGTMSREPSVSRPSTPTQA

SEQ ID NO: 48 - protein, 441 aa, Kluyveromyces lactis
MSSNQDFQPVTESASSVTKFQQNPYGPNPADYLSNVNNYQLIDSTLREGEQFANAFFDTEKKIEIAKALDDFGVDYIELTSPVASEQSRRDCEAICKLGLKAKILTHIRCHMDDARVAVETGVDGVDVVIGTSKFLRQYSHGKDMNYIAKSAIEVIEFVKSKGIEIRFSSEDSFRSDLVDLLNIYKTVDKIGVNRVGIADTVGCANPRQVYELVRTLKSVVSCDIECHFHNDTGCAIANAYTALEGGARLIDVAVLGIGERNGITPLGGLMARMIVAAPEYTKSKYKLHKIRDIENLIAEAVEVNIPFNNPITGFCAFTHKAGIHAKAILANPSTYEILDPHDFGMKRYIHFANRLTGWNAIKSRVDQLNLNLTDDQVKEVTAKIKKLGDIRPLNIDDVDSIIKDFHAEVSTPQLRAVRRDDNDVNDIDIQEPSNKKTKVE

SEQ ID NO: 49 - protein, 418 aa, Schizosaccharomyces pombe
MSVSEANGTETIKPPMNGNPYGPNPSDFLSRVNNFSIIESTLREGEQFANAFFDTEKKIQIAKALDNFGVDYIELTSPVASEQSRQDCEAICKLGLKCKILTHIRCHMDDARVAVETGVDGVDVVIGTSQYLRKYSHGKDMTYIIDSATEVINFVKSKGIEVRFSSEDSFRSDLVDLLSLYKAVDKIGVNRVGIADTVGCATPRQVYDLIRTLRGVVSCDIECHFHNDTGMAIANAYCALEAGATHIDTSILGIGERNGITPLGALLARMYVTDREYITHKYKLNQLRELENLVADAVEVQIPFNNYITGMCAFTHKAGIHAKAILANPSTYEILKPEDFGMSRYVHVGSRLTGWNAIKSRAEQLNLHLTDAQAKELTVRIKKLADVRTLAMDDVDRVLREYHADLSDADRITKEASA

SEQ ID NO: 50 - protein, 465 aa, Aspergillus niger
MCPGADHEPNGQANVANGNGNNGEHPGFTAVETRQNPHPSVSRNPYGHNVGVTDFLSNVSRFQIIESTLREGEQFANAFFDTEKKIEIAKALDEFGVDYIELTSPCASEQSRKDCEAICKLGLKAKILTHIRCHMDDARIAVETGVDGVDVVIGTSSYLREHSHGKDMTYIKNTAIEVIEFVKSKGIEIRFSSEDSFRSDLVDLLSIYSAVDKVGVNRVGIADTVGCASPRQVYELVRVLRGVVSCDIETHFHNDTGCAIANAYCALEAGATHIDTSVLGIGERNGITPLGGLMARMMVADPEYVKSKYRLEKLKDIEDLVAEAVEVNIPFNNYITGFCAFTHKAGIHAKAILNNPSTYEIINPADFGMSRYVHFASRLTGWNAIKSRAQQLKIEMTDDQYKECTAKIKALADIRPIAVDDADSIIRAYYRNLKLGENKPLLDLTADEQAQFAAKEKELAAQASA

SEQ ID NO: 51 - protein, 445 aa, Emericella nidulans
MCPGDHPGFTAVQTRQNPHPSRNPYGHNVGVTDFLSNVSRFKIIESTLREGEQFANAFFDTQKKIEIAKALDEFGVDYIELTSPCASEQSRLDCEAICKLGLKAKILTHIRCHMDDARVAVETGVDGVDVVIGTSSYLREHSHGKDMTYIKNTAIEVIEFVKSKGIEIRFSSEDSFRSDLVDLLSIYSAVDQVGVNRVGIADTVGCASPRQVYELIRVLRGVVSCDIETHFHNDTGCAIANAYCALEAGATHIDTSVLGIGERNGITPLGGLMARMMVADPQYVKSKYKLEKLKDIEDLVAEAVEVNIPFNNYITGFCAFTHKAGIHAKAILNNPSTYEIINPADFGMSRYVHFASRLTGWNAIKSRAQQLNVHMTDDQYKECTAKIKALADIRPIAIDDADSIIRAYYRNLSSGENKPLMDLTADEHAQFLAKEKELTESGTAL

SEQ ID NO: 52 - protein, 474 aa, Penicillium chrysogenum
MVLLPPSLPVCQLKVTAPEFPSNFYLDGDHSGFVGIETRQNPHPSASRNPYGHDAGVTDFLSNVSRFQIIESTLREGEQFANAFFDTAKKIEIAKALDDFGVDYIELTSPCASEQSRADCEAICKLGLKAKILTHIRCHMDDARIAVETGVDGVDVVIGTSSYLREHSHGKDMTYIKNAAIEVIEFVKSKGIEIRFSSEDSFRSDLVDLLSIYSAVDKVGVNRVGIADTVGCASPRQVYELVRVLRGVVGCDIETHFHNDTGCAIANAFCALEAGATHIDTSVLGIGERNGITPLGGLMARMMVADREYVKSKYKLEKLKEIEDLVAEAVEVNIPFNNYITGFCAFTHKAGIHAKAILNNPSTYEIINPADFGMSRYVHFASRLTGWNAIKSRAQQLKLEMTDTQYKECTAKIKAMADIRPIAVDDADSIIRAYHRNLKSGENKPLLDLTAEEQAAFAAKEKELLEAQAAGLPV

SEQ ID NO: 53 - protein, 446 aa, Yarrowia lipolytica
MCATDNAPAANAAPEKPSNVGVEVGHTGEQTNPYGANPADFLSNVSKFQLIESTLREGEQFASAFFDTETKIEIAKALDDFGVDYIELTSPAASEQSRSDCEAICKLGLKAKILTHIRCHMDDARLAVSTGVDGVDVVIGTSQFLRQYSHGKDMNYIAQSAVEVIEFVKSHGIEIRFSSEDSFRSDLVDLLNIYRTVDKIGVNRVGIADTVGCANPRQVYELVRTLKSVVSCDIECHFHNDTGCAIANAYTALEAGANLIDVSVLGIGERNGITSLGGLMARMIAADRDYVLSKYKLHKLRDLENLVADAVQVNIPFNNPITGFCAFTHKAGIHAKAILANPSTYEILNPADFGLTRYIHFANRLTGWNAIKSRVDQLNLHLTDAQCKDVTAKIKKLGDVRSLNIDDVDSIIREFHADVTSTPTVAATEGPAVEDEPAAKKAKTEE

SEQ ID NO: 54 - protein, 687 aa, Phanerochaete chrysosporium
IPQTVIEKVVQKYAVGLPGDKVVKAGDYVMIRPEHVMTHDNTGPVISKFKSIGATRIYNPKQVVFTLDHDVQNKSEKNLKKYATIEAFARTHGIDFYPAGRGIGHQVLVEEGYAFPHTLTVASDSHSNMYGGVGCVGTPIVRTDAAALWATGQTWWQVPRMVKVEFKGRLAPGVSGKDVIVALCGSFNKDEVLNAAIEFSGEGVQHLTVDERLTIANMTTEWGALVGVFPVDDVTLSWYERMLKKLELRTFSTPALGSSIPPPPEHPRINRARLDALRANNLRSDADAEYSSHLVFDLSTLVPYVSGPNSVKVANPLPKLEEAKIKINKAYLLSCTNARASDIAAAAAVIKGHKVHPDVQFYFAPASSEVQREAEQSGDWETLIGAGAKPLPAGCGPCIGLGTGLLEEGEVGISATNRNYKGRMGHPLAQAYLASPAVVAASAIKGYIAGPDSLDPSKLPPAGAPTFSIVNSPSSGAKASQKEPVLVGFPETFAGPLLFAPQDNLNTDGIYPGKYTYQDDITLERQAEVVMENYDPTFAQLDAHTKRGVVLVSGYNFGTGSSREQAATALKSAGIPIVIAGSFGDIFKRNAINNGLVCVESPELVADLTAQFAKDGKRGAGGKEGELTVNKGLSAEVKVVDGALHVTFPDGKTKTYTIQPVGASVQELWLCGGLEGYVLKAIQAENF

SEQ ID NO: 55 - protein, 721 aa, Schizosaccharomyces pombe
MDSGEMHHPYQAFSKVGKCEISQTNPSFSSGMRCLVRSADIQFKGICGLTRGFASFNKPPQTITEKIVQKFAQNIPENKYVRSGDYVTIKPKHCMSHDNSWPVALKFMGIGAKKVFDNRQIVCTLDHDVQNKSEANLRKYKNIESFAKGQGIDFYPAGRGIGHQIMVEQGYAMPGSMAVASDSHSNTYGGVGCLGTPIVRTDAAAIWATGQTWWQIPPIARVNLVGQLPKGLSGKDIIVSLCGAFNHDEVLNHAIEFYGEGLNSLSIESRLTIANMTTEWGALSGLFPTDEKLLAWYEDRLKFLGPNHPRVNRETLDAIKASPILADEGAFYAKHLILDLSTLSPAVSGPNSVKVYNSAATLEKKDILIKKAYLVSCTNGRLSDIHDAAETVKGKKVADGVEFYVGAASSEVEAAAQKNGDWQTLIDSGARTLPAGCGPCIGLGTGLLKDGEVGISATNRNFKGRMGSREALAYLASPAVVAASAIAGKIVAPEGFKNAVSLVSAVDITDKVNKQTASKSSTEAVDSETAIIDGFPSIVAGEIVFCDADNLNTDGIYPGRYTYRDDITKEEMAKVCMENYDSEFGKKTKKDDILVSGFNFGTGSSREQAATAILSRGIPLVVGGSFSDIFKRNSINNALLAIQLPDLVQKLRTAFANESKELTRRTGWHLKWDVRKSTVTVTTSDNKEMSWKIGELGNSVQSLFVRGGLEGWVKHEISKSN

SEQ ID NO: 56 - protein, 693 aa, Kluyveromyces lactis
MFRVQRLRMFSTSRALYAGQNMTEKIVQRHAVGLPEGKTVVSGDYVSIKPAHCMSHDNSWPVALKFMGLGASTIKNPRQVVNTLDHDVQNKSEKNLTKYKNIENFAKKHGIDFYPAGRGIGHQIMIEEGYAFPLTMTVASDSHSNTYGGIGALGTPIVRTDAAAIWATGQTWWQIPPVAQVELKGELPAGISGKDIIVALCGVFNQDQVLNHAIEFTGDSLDKIPIDYRLTIANMTTEWGALSGLFPVDNVLLDFYRNRLTKVGNNHPRINEARINELQAKSDSLQADPDAKYAKKLIIDLSTLTHYVSGPNSVKISSTVDDLSKQDIKVNKAYLVSCTNSRLSDLESAANVVCPSGDINQVHKVAEGVEFYIAAASSEVEAEARATGAWQKLLNAGCLPLPAGCGPCIGLGTGLLEEGQVGISATNRNFKGRMGSKDALAYLASPSVVAASAILGKIGSPAEVLGTKDPNFTGVVATVEDAPATSADGKDVADESGASGSVEILEGFPSEISGELVLCDADNINTDGIYPGKYTYQDDVPKETMAKVCMENYDPDFQTKANPGDILISGFNFGTGSSREQAATAILAKGIKLVVSGSFGNIFFRNSINNALLTLEIPALINMLRDRYKDAPKELTRRTGWFLKWDVSQAKVYVTEGSVNGPIVLEQKVGELGKNLQEIIVKGGLESWVKSQL

SEQ ID NO: 57 - protein, 693 aa, Saccharomyces cerevisiae
MLRSTTFTRSFHSSRAWLKGQNLTEKIVQSYAVNLPEGKVVHSGDYVSIKPAHCMSHDNSWPVALKFMGLGATKIKNPSQIVTTLDHDIQNKSEKNLTKYKNIENFAKKHHIDHYPAGRGIGHQIMIEEGYAFPLNMTVASDSHSNTYGGLGSLGTPIVRTDAAAIWATGQTWWQIPPVAQVELKGQLPQGVSGKDIIVALCGLFNNDQVLNHAIEFTGDSLNALPIDHRLTIANMTTEWGALSGLFPVDKTLIDWYKNRLQKLGTNNHPRINPKTIRALEEKAKIPKADKDAHYAKKLIIDLATLTHYVSGPNSVKVSNTVQDLSQQDIKINKAYLVSCTNSRLSDLQSAADVVCPTGDLNKVNKVAPGVEFYVAAASSEIEADARKSGAWEKLLKAGCIPLPSGCGPCIGLGAGLLEPGEVGISATNRNFKGRMGSKDALAYLASPAVVAASAVLGKISSPAEVLSTSEIPFSGVKTEIIENPVVEEEVNAQTEAPKQSVEILEGFPREFSGELVLCDADNINTDGIYPGKYTYQDDVPKEKMAQVCMENYDAEFRTKVHPGDIVVSGFNFGTGSSREQAATALLAKGINLVVSGSFGNIFSRNSINNALLTLEIPALIKKLREKYQGAPKELTRRTGWFLKWDVADAKVVVTEGSLDGPVILEQKVGELGKNLQEIIVKGGLEGWVKSQL

SEQ ID NO: 58 - protein, 769 aa, Aspergillus niger
MQSRLLPSGPGRRWISLRVPNTPQRRAFASTRFLFQDVFQSQLDDPSSAALFSSLQSSRAVPQTLTEKIVQKYAVGLPDGKFVKSGDYVTIAPHRIMTHDNSWPVALKFMSIGASKMHDPNQVVMTLDHDVQNKTEKNLQKYRQIEEFAKQHGVEFYPAGRGIGHQIMVEEGFAWPGTLVVASDSHSNTYGAVASVGTPIVRTDAASIWATGKTWWQIPPVAKVTFTGILPPGVTGKDVIVALCGLFDKDDVLNHAIEFTGSEETMRSLPMDSRLTIANMTTEWGALSGLFPMDGVLKGWLKGKATTAAMGLADGPFKTLAARNFTHPAIEQLFVNPLTADKGAKYAKELFLDLSTLSPYVSGPNSVKIATPLKELEAQDIKVDKAYLVSCTNSRASDIAAAAKVFKDAAEKNGGKVPKIADGVKFYIAAASIPEQLAAEGAGDWQTLLEAGATALPAGCGPCIGLGTGLLEPGEVGISASNRNFKGRMGSTEAKAYLGSPEIVAASALSGKLSGPGWYQPPEGWTEVVRGEGDGIREEDRMLNTEQALEKLLGQLDDLVADGEKRFAPEEKVEEEGGLTEVYPGFPERVSGEIVFCDADNLNTDAIYPGYWTYQDNVPVEKMAEVCMSNYDKEFASIAKEGDILVVGYNFGCGSSREQAATALLAKQIPLVVSGSFGNIFSRNSINNALMGLEVPRLVSRLREEFGDKQLTRRTGWTLTWDVRRSQIEIQEGQNGPKWTHKVGELPPNVQEIIAKGGLEKWVKNAIEA

SEQ ID NO: 59 - protein, 776 aa, Emericella nidulans
MQSRLVSQSGLGRRWAVLRCALSKTYQRRTLTSTRRQFQDVFQSQLEDPTSAALFSALNSSKAVPQTLTEKIVQKYSVGLPQGKFVKSGDYVTIQPHRCMTHDNSWPCALKFMSIGASRLHNPDQIVMTLDHDVQNKSDKNLKKYRQIEEFATQHGVEFYPAGRGIGHQIMIEEGFAWPGTLAVASDSHSNMYGGVGCLGTPIVRTDAASVWATGKTWWQIPPVAKVTFKGVLPPGVTGKDVIVALCGLFNKDDVLNHAIEFTGSEETMRSLSVDTRLTIANMTTEWGALSGLFPIDSVLKGWLRGKATTAAMGLADGPFKTRAAERFTHPLLEQLFENPLTADKGAKYAKELFLDLSSLSPYVSGPNSVKVATPLKELEAQNIKVDKAYLVSCTNSRASDIAAAAKVFKEAAEKNGGKIPKIADGVKFYIAAASIPEQLAAEGNGDWQTLLEAGATQLPAGCGPCIGMGQGLLEPGEVGISASNRNFKGRMGSTEAKAYLGSPEVVAASALSGKLSGPGWYQTPEGWTEVIRGEGDGIREEDRMLTNEEALEKIIGQLDDLVADGEKRFASETPAVEESEQGLTEIYPGFPERVSGELVFCDADNVNTDGIYPGKYTYQDDVPPETMARVCMENYDPEFSTTAKEGDILVSGFNFGCGSSREQAATAILAKKIPLVVSGSFGNIFSRNSINNALMGLEVPRLVNRLRETFGSGDKVLTRRTGWTLTWDVRKSQIEVQEGPGGPKWTHKVGELPPNVQEIIAKGGLEKWVKNAIGA

SEQ ID NO: 60 - protein, 774 aa, Penicillium chrysogenum
MPSAESGPKTLYDKVFQDHIVNEQEDGTCLIYIDRHLVHEVTSPQAFEGLKNASRQVRRPDCTLATVDHNIPTSSRKNFKNAADFIKENDSRLQCTTLEENVKDFGLTYFGMGDKRQGIVHIIGPEQGFTLPGTTVVCGDSHTSTHGAFGALAFGIGTSEVEHVLATQTLITRRSKNMRIQVDGELPAGVTSKDVVLHIIGVIGTAGGNGAVIEFCGSVIRGLSMEARMSMCNMSIEGGARAGMIAPDEITFEYLKGRPLAPKYGSAEWNKATSYWSSLKSDAGAKYDSEVFIDGKDIIPTISWGTSPQDVVPITGVVPSPDDFEDENRKASCKRALEYMGLVSGTPMKDVVVDKVFIGSCTNARIEDLRAAAKVVNGRKVASNIKRAMIVPGSGLVKEQAESEGLDKVFTDAGFEWREAGCSMCLGMNPDILSPKERCASTSNRNFEGRQGAQGRTHLMSPAMAATAAIVGKLADVREHVVASPVLGKASPKIDVQPVFESPETEDELDRVLDRPADNEPHTNSSAPASGGGKSTGLPTFTTLKGIAAPLDRANVDTDAIIPKQFLKTIKRTGLGTALFYELRYTDDKENPDFVLNQGIYRDSKILVVTGPNFGCGSSREHAPWALLDFGIKCIIAPSFADIFFNNTFKNGMLPVVVSDEVALQKIADEARAGREVEVDLVNQEIKDAQGNKITSFEVEAFRKHCLINGLDDIGLTLQMESKIRSFESKRTLDTPWLDGSAYLRRDRRGATMVEAAPVPKTNRGDVKNEPLEW

SEQ ID NO: 61 - protein, 785 aa, Penicillium chrysogenum
MSPCSMLLKRVARPPVSTTCRLVRPRWAPSFGVPSRTIHHPLRSVSKSLSTRALSTTAPARVEGFHSQHENASIPFSETPSEKRTPQTLTEKIVQRYAVGLPEGKLVRSGDYISLAPGYCMTHDNSWPVALKFMSMGATKIHRPEQIVMTLDHDVQNTSAANLKKYEQIETFAGQHGIDFYPAGRGIGHQVMVEEGYAWPGTMAVASDSHSNHYGGVGCLGTAVVRTDAASIWATSRTWWQIPPVARVTFTGTLPAGVTGKDVIVALCGLFNSDVLNHAIEFTGSEETMESLLVDSRLTIANMTTEWGALTGLFPIDRTLKRWLRYKATEAAMSEDRTTRQRITHERIDELFANPLTADPDAQYAKQLYLNLSTLSPYVSGPNSVKVATPLNELAQQNIKVNRAYIVSCTNSRASDLAAAAKVFKDAAKANPGTTPKIADGVKLYIAAASAPEQEAAESTGDWQALLDAGAQPLPAGCGPCIGLGTGLLEPGEVGISASNRNFKGRMGSRDALAYLASPEVVAASALSGVISGPGAYQVPENWSGVEHGFGTGLPPTTENELTNLLQQMESLIDRVESAGEDSKPATEILPGFPERISGEIVFLDADNLDTDNIYPGKLTYQDNVSKDDMAAACMQNYDPEFKGIAKPSDILVAGFNFGCGSSREQAATAILAKQIPLVVAGSFGNIFSRNSINNALMGLEVPRLIERLRASFAQPPPGDAGRQLTRRTGWTLTWDVKRSVVEVKEGESGESWTEQVGELPANVQEIIAEGGLEAWVKGKVAKSE

SEQ ID NO: 62 - protein, 360 aa, Phanerochaete chrysosporium
MAFRLPLRRALSTAAASRSSLKIGLVPADGIGREVIPAARQAIEALGSDIPKPEFVDLLAGFELFTRTGTALPEETVQALKECDCALFGAVSSPSRRVTGYSSPIVALRKILDLYANVRPVVAPTPEEKPNVDLIVVRENTECLYVKQEQMTPTENGREARATRVITERASRRIGQMAFELAKARPRKHVTIIHKSNVLSITDGLFRETVRSVPRLNEGKYDDVEIAEQLVDSAVYRLFREPHIYDVMVAPNLYGDIISDAAAALVGSLGLVPSVNAGDNFVMGEPVHGSAPDIAGQGIANPIASIRSAALMLRHLGYGAPADRLDKAVDEVIREGQILTPDLGGKSKTQDVVDAVLKRI

SEQ ID NO: 63 - protein, 362 aa, Schizosaccharomyces pombe
MSATRRIVLGLIPADGIGKEVVPAARRLMENLPAKHKLKFDFIDLDAGWGTFERTGKALPERTVERLKTECNAALFGAVQSPTHKVAGYSSPIVALRKKMGLYANVRPVKSLDGAKGKPVDLVIVRENTECLYVKEERMVQNTPGKRVAEAIRRISEEASTKIGKMAFEIAKSRQKIRESGTYSIHKKPLVTIIHKSNVMSVTDGLFRESCRHAQSLDPSYASINVDEQIVDSMVYRLFREPECFDVVVAPNLYGDILSDGAASLIGSLGLVPSANVGDNFVMSEPVHGSAPDIAGRGIANPVATFRSVALMLEFMGHQDAAADIYTAVDKVLTEGKVLTPDLGGKSGTNEITDAVLANIHN

SEQ ID NO: 64 - protein, 360 aa, Emericella nidulans
MAAARTLRIGLIPGDGIGREVIPAGRRILEALPASLNLKFNFVDLDAGYDCFKRTGTALPDKTVEVLKKECDGALFGAVSSPSTKVAGYSSPIVALRKKLDLFANVRPVKTTAGTSAGKPIDLVIVRENTEDLYVKEESTEETPNGKVARAIKQISERASSRIATIAGEIALRRQNIRDGAAASGLRTKPMVTITHKSNVLSQTDGLFRETARAALAAQKFSSVEVEEQIVDSMVYKLFRQPEYYDVIVAPNLYGDILSDGAAALVGSLGLVPSANVGDNFAIGEPCHGSAPDIEGKNIANPIATLRSVALMLEFLGEEQAAAKIYAAVDGNLDEGKYLSPDMGGKATTTEVLEDVLKRL

SEQ ID NO: 65 - protein, 359 aa, Penicillium chrysogenum
MAAARTLRIGLIPGDGIGREVIPAGRRILESLPSSLNLKFSFVDLDAGYETFQKTGTALPDKTVDTLKKECDGALFGAVSSPSTKVAGYSSPIVALRKKLDLYANVRPVKTTAGNSNGKPIDLVIVRENTEDLYVKEERTIEGPNGKVAEAIKRISEKASFRISNIAGEIALRRQNIRAASPTSTRDQPMVTITHKSNVLSQTDGLFRETARRALSAEKFSSVFVEEQIVDSMVYKLFRQPEFYDVIVAPNLYGDILSDGAAALVGSLGLVPSANVGDGFAIGEPCHGSAPDIEGKGISNPIATIRSVALMLEFLGEEKAAAQIYAAVDGNLDAAQFLTPDMGGKATTQQVLDDVLKRL

SEQ ID NO: 66 - protein, 371 aa, Saccharomyces cerevisiae
MFRSVATRLSACRGLASNAARKSLTIGLIPGDGIGKEVIPAGKQVLENLNSKHGLSFNFIDLYAGFQTFQETGKALPDETVKVLKEQCQGALFGAVQSPTTKVEGYSSPIVALRREMGLFANVRPVKSVEGEKGKPIDMVIVRENTEDLYIKIEKTYIDKATGTRVADATKRISEIATRRIATIALDIALKRLQTRGQATLTVTHKSNVLSQSDGLFREICKEVYESNKDKYGQIKYNEQIVDSMVYRLFREPQCFDVIVAPNLYGDILSDGAAALVGSLGVVPSANVGPEIVIGEPCHGSAPDIAGKGIANPIATIRSTALMLEFLGHNEAAQDIYKAVDANLREGSIKTPDLGGKASTQQVVDDVLSRL

SEQ ID NO: 67 - protein, 369 aa, Kluyveromyces lactis
MMRTRFIQLSRRAYASNAKNLTIGLIPGDGIGKEVIPAGKKILESLNPKYGLSFKFIDLQAGWETFQNTGKALPDETIDILKNQCEGALFGAVQSPTTKVEGYSSPIVALRKNLGLFANVRPVKSVDGTKDRKVDLVIVRENTEDLYIKLEKSYIDEATGTRVADATKRITEIATKNIATIALQIAQQRLEQNGHATLTVTHKSNVLSQSDGLFREVCRETYEANKDKYGGVQYNEQIVDSMVYRMFREPECFDVVVAPNLYGDILSDGAAALVGSLGVVPSANVGPNIVIGEPCHGSAPDIAGKGISNPIATIRSTALMLEFLGYPEPAKDIHKAVDANIREGKYLTPDLGGNSTTQQVLEDVLSKLD

SEQ ID NO: 68 - protein, 536 aa, Penicillium chrysogenum
MSPPTALDVNLVGVTDTSTVPVPEPLTVNGVSAWREKTAKVPTGVAAACNSDMFKSPICYTKPKAKQFEHRFSLEAKSRKASTLKTAARYLKTPGLISLGGGLPSPEYFPFEHLDIKVPTAPGFSPEATRESGTVLRAGKHDIQEGTSTYDLEIALNYGQATGAAPLLRFVTEHTEIIHSPPYSDWQCTLTAGSTYAWDTALRVFCERGDYILMEEYTFASAAETAFPLGIKVAGIPMDEQGLIPEAMDKILGDWDVAARGARKPHVLYTIPTGQNPTGATQSAERRHAVYKVAQKHDLIIVEDEPYYFLQMQPYTSGDASPVPPPSSHEEFINSLVPSFLSMDTDGRVVRLESFSKVISPGSRVGWIVASEQIIERFIRNFEVSSQNPSGIAQIALFKLLDEHWGHSGYLDWLINLRMSYTARRDSLVHACEKHLPREIVHWEAPAAGMFQWMSIDWRKHPGIAAGKTHADIEEEIFLSAVNGGVLLSRGSWFKPDHDTVEEKMFFRATFAAASSEKIDEAISRFAQSLRAQFGL

SEQ ID NO: 69 - protein, 376 aa, Thermus thermophilus
MREWKIIDSTLREGEQFEKANFSTQDKVEIAKALDEFGIEYIEVTTPVASPQSRKDAEVLASLGLKAKVVTHIQCRLDAAKVAVETGVQGIDLLFGTSKYLRAAHGRDIPRIIEEAKEVIAYIREAAPHVEVRFSAEDTFRSEEQDLLAVYEAVAPYVDRVGLADTVGVATPRQVYALVREVRRVVGPRVDIEFHGHNDTGCAIANAYEAIEAGATHVDTTILGIGERNGITPLGGFLARMYTLQPEYVRRKYKLEMLPELDRMVARMVGVEIPFNNYITGETAFSHKAGMHLKAIYINPEAYEPYPPEVFGVKRKLIIASRLTGRHAIKARAEELGLHYGEEELHRVTQHIKALADRGQLTLEELDRILREWITA

SEQ ID NO: 70 - protein, 393 aa, Deinococcus radiodurans
MAGIFMTDAPPPLIPARSWAIIDSTLREGEQFARGNFGTDDKVEIARALDAFGAEYIEVTTPMVSEQTRQDIRKLTGLGLRAKFLTHVRCHMEDVQRAVDTGVDGLDLLFGTSSFLREFSHGKSIAQIIDTAGEVIGWIKTHHPELEIRFSAEDTFRSEEADLMAVYSAVSELGVHRVGLADTVGVATPRQVYTLVREVRKVIHEGCGIEFHGHNDTGCAVSNAYEAIEAGATHIDTTILGIGERNGITPLGGLLARMFTFDPQGLIDKYNLELLPELDRMIARMVDLPVPWNNYLTGEFAYNHKAGMHLKAIYLNPGAYEAIPPGVFGVGRRIQAASKVTGKHAIAYKARELGLHYGEDALRRVTDHIKSLAEQDELDDAHLEQVLREWVSA

SEQ ID NO: 71 - protein, 389 aa, Deinococcus geothermalis
MTPDSSTPLIPARSWAIIDSTLREGEQFARGNFKTGDKIEIARLLDAFGAEFLEVTTPMVGAQTQADIRRLTSLGLNAKILTHVRCHLEDVQRAVDLGVDGLDLLFGTSSFLREFSHGKSIAQIIDTASEVIGWIKQNHPDLEIRFSAEDTFRSEEADLMAVYRAVSDLGVHRVGLADTVGVATPRQVYTLVREVRKVIHAECGIEFHGHNDTGCAVSNAYEAIEAGATHIDTTILGIGERNGITPLGGFLARMFTFDPQGLIDKYNLELLPELDRLIARLVDLPIPWNNYLTGEFAYNHKAGMHLKAIYLNPGAYEAIPPSVFGVGRRIQAASKVTGKHAIAHKARELGLHYGEDALRRVTDHIKALAEEGELDDAHLEQVLREWVRA

SEQ ID NO: 72 - protein, 553 aa, Sulfolobus solfataricus
MALKMKYDFLLLSLKLLNLPIIFHLCSVSKKSVEVLDTTLRDGSQGANISFTLNDKIKIALLLDELGVDYIEGGWPGSNPKDEEFFREIKKYRLSKAKIAAFGSTKRKDVSVKEDISLNSIVKADVDVAVIFGKSWSLHATEVLKVTKQDNLDIVYDSINYLKSHGLKVIFDAEHFYQGFKEDPEYALEVVKTAESAGADVIALADTNGGTPPFEVYEITKKVREVLQVKLGIHAHNDIGCAVANSLMAIKAGARHVQGTINGIGERTGNADLIQIIPTLILKMGLNALNGQESLRKLREVSRIVYEILGLPPNPYQPYVGDNAFAHKAGVHVDAVMKVPRAYEHVDPSLVGNDRKFVISELSGTANLVSYLQGLGIAVDKKDERLKKALNKIKELEARGYSFDVGPASAILITLKELNIYKNYINLEYWKVINENNGLSIGIVKVNSQLEVAEGVGPVNAIDRALRMALQRVYPEIGEVKLIDYRVILPSEIKNTESVVRVTIEFTDNKMNWRTEGVSKSVVEASVMALVDGLDYYLQLKKTLKTAVDNYIV

SEQ ID NO: 73 - protein, 361 aa, Thermococcus kodakarensis
MVLDSTLREGEQTPGVNFSPEDRLRIGIALDEVGVDFIEAGHPAVSGEILEGIRLLASHGLNANILAHSRALRSDIDLVLKAEAEWIGIFMCLSQRCLERRFRTDLSGALTRVEDAILYAKDHGLKIRFTPEDTTRTEWKNLTAALNLARELKVDRVSIADTTGAAHPLEFYDLVKRVVEFGIPVNVHCHNDLGLALANAIMGIEAGATLVDATVNGIGERAGIVDLSHLLAALYYHYGVKKYRLEKLYSLSRLVSEITGLQVQVNYPIVGQNAFTHKAGLHVSAVVRDPSFYEFLPAETFGRERTIYVDRFAGRETIRFHLSRFGIHDEEIIEELLRRVKASRRPFTPEMLAEEARRMMT

SEQ ID NO: 74 - protein, 361 aa, Pyrococcus horikoshii
MILDSTLREGEQTPGVNYSPEQRLRIALALDEIGVDFIEVGHPAVSKDVFIGIKLIASQDLNANLLAHSRALLEDIDYVIQADVEWVGIFFCLSNACLRKRFRMSLSQALERISKAIEYAKDHGLKVRFTPEDTTRTEWENLRRAIELAKELKVDRISVADTTGGTHPLRFYTLVKKVVNFGIPVNVHCHNDLGLALANAIMGIEGGATVVDATVNGLGERAGIVDLAQIVTVLYYHYGVKKYRLDKLYEISRMVSEITGIALQPNYPIVGENAFTHKAGLHVSAVLKDPRFYEFLPAEVFGRERTIYVDRFAGKDTIRYYLQKLGINDEEFVKVLLKRVKSSREPFTWDKFIEEVRRLKT

SEQ ID NO: 75 - protein, 385 aa, Azotobacter vinelandii
MASVIIDDTTLRDGEQSAGVAFNADEKIAIARALAELGVPELEIGIPSMGEEEREVMHAIAGLGLSSRLLAWCRLCDVDLAAARSTGVTMVDLSLPVSDLMLHHKLNRDRDWALREVARLVGEARMAGLEVCLGCEDASRADLEFVVQVGEVAQAAGARRLRFADTVGVMEPFGMLDRFRFLSRRLDMELEVHAHDDFGLATANTLAAVMGGATHINTTVNGLGERAGNAALEECVLALKNLHGIDTGIDTRGIPAISALVERASGRQVAWQKSVVGAGVFTHEAGIHVDGLLKHRRNYEGLNPDELGRSHSLVLGKHSGAHMVRNTYRDLGIELADWQSQALLGRIRAFSTRTKRRSPQPAELQDFYRQLCEQGNPELAAGGMA

SEQ ID NO: 76 - protein, 381 aa, Klebsiella pneumoniae
MERVLINDTTLRDGEQSPGVAFRTSEKVAIAEALYAAGITAMEVGTPAMGDEEIARIQLVRRQLPDATLMTWCRMNALEIRQSADLGIDWVDISIPASDKLRQYKLREPLAVLLERLAMFIHLAHTLGLKVCIGCEDASRASGQTLRAIAEVAQNAPAARLRYADTVGLLDPFTTAAQISALRDVWSGEIEMHAHNDLGMATANTLAAVSAGATSVNTTVLGLGERAGNAAAWKPSALGLERCLGVETGVHFSALPALCQRVAEAAQRAIDPQQPLVGELVFTHESGVHVAALLRDSESYQSIAPSLMGRSYRLVLGKHSGRQAVNGVFDQMGYHLNAAQINQLLPAIRRFAENWKRSPKDYELVAIYDELCGESALRARG

SEQ ID NO: 77 - protein, 381 aa, Pseudomonas stutzerii
MSIVIDDTTLRDGEQSAGVAFSAEEKLAIARALAQLGVPELEIGIPSMGEEECEVMRAIAGLALPVRLLAWCRLCDADLLAAGGTGVGMVDLSLPVSDLMLQHKLGRDRDWALREAARLVGAARDAGLEVCLGCEDASRADPEFIVRVAEVAQAAGARRLRFADTVGVMEPFAMHARFRFLAERLDLELEVHAHDDFGLATANTLAAVRGGATHINTTVNGLGERAGNAALEECALALKHLHGIDCGIDVRGIPSISALVEQASGRQVAWQKSVVGAGVFTHEAGIHVDGLLKHRRNYEGLNPDELGRSHSLVLGKHSGAHMVELSYRELGIELQQWQSRALLGCIRRFSTQTKRSPQSADLQGFYQQLCEQGLALAGGAA

SEQ ID NO: 78 - protein, 477 aa, Acinetobacter sp. NClMB9871
MNYPNIPLYINGEFLDHTNRDVKEVFNPVNHECIGLMACASQADLDYALESSQQAFLRWKKTSPITRSEILRTFAKLAREKAAEIGRNITLDQGKPLKEAIAEVTVCAEHAEWHAEECRRIYGRVIPPRNPNVQQLVVREPLGVCLAFSPWNFPFNQAIRKISAAIAAGCTIIVKGSGDTPSAVYAIAQLFHEAGLPNGVLNVIWGDSNFISDYMIKSPIIQKISFTGSTPVGKKLASQASLYMKPCTMELGGHAPVIVCDDADIDAAVEHLVGYKFRNAGQVCVSPTRFYVQEGIYKEFSEKVVLRAKQIKVGCGLDASSDMGPLAQARRMHAMQQIVEDAVHKGSKLLLGGNKISDKGNFFEPTVLGDLCNDTQFMNDEPFGPIIGLIPFDTIDHVLEEANRLPFGLASYAFTTSSKNAHQISYGLEAGMVSINHMGLALAETPFGGIKDSGFGSEGGIETFDGYLRTKFITQLN

SEQ ID NO: 79 - protein, 473 aa, Brucella melitensis 16M
MRIGKMEMQTRYPDVKLFIDGTWRDGSRGETIEIFNPATDEVIGHIARATTADLDDALAAVDRGFEAWSKVSAFDRYKIMRRAADIFRSRGEEVARLLTMEQGKPLAEARIEAAAACDLIDWFAEEARRSYGRIVPPRQAYVMQAEVKEPVGPVAAFTPWNFPINQAVRKISAALAAGCSILLKAAEDTPAAPAELVRAFAEAGLPDGAINLVYGDPAEISAYLIPHPVIRKVSFTGSTQVGKQLAALAGLHMKRVTMELGGHAPVIIAADADVEQAIKVVSGSKFRNAGQVCISPTRFLIENSVYDQVVEGMAAYATSLKVGDGLEAGTTMGPLVNAKRVNAMERLVQDAREHKARVVTGGERIGNRGNFFEPTILADVPRDAAIMNEEPFGPVALLNRFDALDEALSEANRLNYGLAAYAFTGSSAKAARISSTVRSGMITINQLRSGPAGSALRRDQRFRLWNGRRCRRA

SEQ ID NO: 80 - protein, 530 aa, Acinetobacter baumannii
MRLIMLNITGQNFIAGQRSSAGSKFVLSYDAATDEALPYQFAQATPEEIDQAAQAAALAYPAFRQTTPEQRAVFLETIASEIDALDDQFIATVCQETALPEARIRGERGRTTGQLRLFAQVLRRGDYLGARIDLALPERQPLPRPDLRQYKIGVGPVAVFGASNFPLAFSTAGGDTASALAAGCPVIVKAHSGHMATAESIANAICSAIEKCAMPKGIFSMIYGQGVGEPLVKHPAIKAVGFTGSLKGGRALCDLAAARPEPIPVFAEMSSINPMILLPEALKVRGDKIATELSGSVVLGCGQFCTNPGLIIGIKSPEFSQFLDHFKAAMAQQPPQTMLNKGTLRSYEHGLKELLAHDKIEHLAGQPQQGPQAYPQLFKADVSLLLEHDEFLQEEVFGPTTIVIEVESAEQLALALNGLRGQLTASLIAEPQDFENFATLIPLLEEKAGRLLLNGYPTGVEVCDAMVHGGPYPATSDARGTSVGTLAIERYLRPVCYQNYPDHLLPLALQNANPLGIARLVNGEMSKAAL

SEQ ID NO: 81 - protein, 481 aa, Azospirillum brasilense
MANVTYTDTQLLIDGEWVDAASGKTIDVVNPATGKPIGRVAHAGIADLDRALAAAQSGFEAWRKVPAHERAATMRKAAALVRERADAIAQLMTQEQGKPLTEARVEVLSAADIIEWFADEGRRVYGRIVPPRNLGAQQTVVKEPVGPVAAFTPWNFPVNQVVRKLSAALATGCSFLVKAPEETPASPAALLRAFVDAGVPAGVIGLVYGDPAEISSYLIPHPVIRKVTFTGSTPVGKQLASLAGLHMKRATMELGGHAPVIVAEDADVALAVKAAGGAKFRNAGQVCISPTRFLVHNSIRDEFTRALVKHAEGLKVGNGLEEGTTLGALANPRRLTAMASVIDNARKVGASIETGGERIGSEGNFFAPTVIANVPLDADVFNNEPFGPVAAIRGFDKLEEAIAEANRLPFGLAGYAFTRSFANVHLLTQRLEVGMLWINQPATPWPEMPFGGVKDSGYGSEGGPEALEPYLVTKSVTVMAV

SEQ ID NO: 82 - DNA, 1350 bp, Bacillus weihenstephanensis
  CDS (1)..(1350)
gtgcaagcgacggagcaaacacaaagtttgaaaaaaacagatgaaaagtacctttggcatgcgatgagaggagcagcccctagtccaacgaatttaattatcacaaaagcagaaggggcatgggtgacggatattgatggaaaccgttatttagacggtatgtccggtctttggtgcgtgaatgttgggtatggtcgaaaagaacttgcaagagcggcgtttgaacagcttgaagaaatgccgtatttccctctgactcaaagtcatgttcctgctattaaattagcagaaaaattgaatgaatggcttgatgatgaatacgtcattttcttttctaacagtggatcggaagcgaatgaaacagcatttaaaattgctcgtcaatatcatcaacaaaaaggtgatcatggacgctataagtttatttcccgctaccgcgcttatcacggtaactcaatgggagctcttgcagcaacaggtcaagcacagcgaaagtataaatatgaaccactcgggcaaggattcctgcatgtagcaccgcctgatacgtatcgaaatccagaggatgttcatacactggcaagtgctgaggaaatcgatcgtgtcatgacatgggagttaagccaaacagtagccggtgtgattatggagccaatcattactgggggcggaattttaatgcctcctgatggatatatgggaaaagtaaaagaaatttgcgagaagcacggtgcgttgctcatttgtgatgaagttatatgtggatttggccggacagggaagccatttggatttatgaattatggcgtcaaaccagatatcattacaatggcaaaaggtattacaagtgcgtatcttcctttgtcagcaacagcagttagacgagaggtttatgaggcattcgtaggtagtgatgattatgatcgcttccgccatgtaaatacgttcggagggaatcctgctgcttgcgctttagctttgaagaatttagaaattatggagaatgagaaactcattgaacgttccaaagaattgggtgaacgactgttatatgagctagaggatgtaaaagagcatccaaacgtaggggatgttcgcggaaagggccttcttttaggcattgaactagtggaagataagcaaacaaaagaaccggcttccattgaaaagatgaacaaagtcatcaatgcttgtaaagaaaaaggtctaattattggtaaaaatggtgacactgtcgcaggttacaataatattttgcagcttgcacctccattaagcatcacagaggaagactttacttttatcgttaaaacaatgaaagaatgtttatcccgcattaacgggcagtaa

SEQ ID NO: 83 - protein, 449 aa, Bacillus weihenstephanensis
VQATEQTQSLKKTDEKYLWHAMRGAAPSPTNLIITKAEGAWVTDIDGNRYLDGMSGLWCVNVGYGRKELARAAFEQLEEMPYFPLTQSHVPAIKLAEKLNEWLDDEYVIFFSNSGSEANETAFKIARQYHQQKGDHGRYKFISRYRAYHGNSMGALAATGQAQRKYKYEPLGQGFLHVAPPDTYRNPEDVHTLASAEEIDRVMTWELSQTVAGVIMEPIITGGGILMPPDGYMGKVKEICEKHGALLICDEVICGFGRTGKPFGFMNYGVKPDIITMAKGITSAYLPLSATAVRREVYEAFVGSDDYDRFRHVNTFGGNPAACALALKNLEIMENEKLIERSKELGERLLYELEDVKEHPNVGDVRGKGLLLGIELVEDKQTKEPASIEKMNKVINACKEKGLIIGKNGDTVAGYNNILQLAPPLSITEEDFTFIVKTMKECLSRINGQ

SEQ ID NO: 84 - DNA, 1350 bp, Artificial
  B. weihenstephanensis KBAB4 aminotransferase codon-optimised gene
atgcaggctaccgaacaaacccaatctctgaaaaagactgacgaaaaatatctgtggcacgcgatgcgcggtgcagctccgtctccgaccaacctgattattaccaaagctgaaggcgcgtgggtgaccgacattgacggtaaccgttatctggatggcatgagcggcctgtggtgtgttaatgtcggttatggccgtaaggagctggcgcgcgcggcatttgaacaactggaagaaatgccgtacttcccgctgactcaaagccatgtgccggctatcaaactggcggaaaaactgaacgaatggctggacgacgaatacgtgattttcttctctaattctggctccgaagcaaacgaaaccgcattcaaaatcgcccgtcaatatcaccagcagaaaggtgaccacggccgctataaattcatcagccgttatcgtgcataccatggtaattctatgggtgcgctggctgctaccggtcaggctcagcgcaaatacaagtacgaaccgctgggtcagggttttctgcacgttgcaccaccggatacctaccgtaacccggaagacgtccacaccctggcttctgccgaagaaatcgatcgtgttatgacctgggagctgtcccagactgttgcgggtgttatcatggaacctattattaccggtggtggcattctgatgccgccggacggttatatgggtaaagtcaaggaaatctgcgaaaaacacggcgcgctgctgatctgcgatgaagttatctgtggcttcggtcgcaccggcaaaccatttggcttcatgaattatggcgtaaaacctgacattattaccatggctaaaggcattacttccgcttatctgccgctgagcgcgaccgcagttcgccgcgaagtttatgaagcgtttgttggttctgatgattacgaccgtttccgtcatgtaaacacgtttggcggtaacccagcggcatgtgcgctggcgctgaaaaacctggaaatcatggaaaacgaaaagctgatcgaacgtagcaaagaactgggtgaacgtctgctgtacgaactggaagatgtcaaagaacacccgaacgtgggcgatgttcgcggtaaaggcctgctgctgggtattgaactggttgaagacaaacagaccaaggaaccggcttccattgaaaagatgaacaaagtgattaacgcgtgcaaagagaaaggcctgatcattggtaagaacggtgataccgtggcaggttataacaacattctgcagctggcgccgcctctgagcatcactgaagaagatttcaccttcatcgtcaaaactatgaaggagtgcctgagccgcatcaatggtcagtaa

SEQ ID NO: 85 - DNA, 1371 bp, Pseudomonas aeruginosa
  CDS (1)..(1371)
atgaacagccaaatcaccaacgccaagacccgtgagtggcaggcgttgagccgcgaccaccatctgccgccgttcaccgactacaagcagttgaacgagaagggcgcgcggatcatcaccaaggccgaaggcgtctatatctgggacagcgagggcaacaagatcctcgatgcgatggccggcctctggtgcgtcaacgtcggctacggccgcgaggagctggtccaggccgccacccggcagatgcgcgagttgccgttctacaacctgttcttccagaccgcccacccgccggtggtcgagctggccaaggcgatcgccgacgtcgctccggaaggcatgaaccacgtgttcttcaccggctccggctccgaggccaacgacaccgtgctgcgtatggtccgccactattgggcgaccaagggccagccgcagaagaaagtggtgatcggccgctggaacggctaccacggctccaccgtcgccggcgtcagcctgggcggcatgaaggcgttgcatgagcagggtgatttccccatcccgggcatcgtccacatcgcccagccctactggtacggcgagggcggcgacatgtcgccggacgagttcggcgtctgggccgccgagcagttggagaagaagattctcgaagtgggcgaggaaaacgtcgccgccttcatcgccgagccgatccagggcgccggcggcgtgatcgtcccgccggacacctactggccgaagatccgcgagatcctcgccaagtacgacatcctgttcatcgccgacgaagtgatctgcggcttcggccgtaccggcgagtggttcggcagccagtactacggcaacgccccggacctgatgccgatcgccaagggcctcacctccggctacatccccatgggcggggtggtggtgcgcgacgagatcgtcgaagtgctcaaccagggcggcgagttctaccacggcttcacctattccggtcacccggtggcggccgccgtggccctggagaacatccgcatcctgcgcgaagagaagatcatcgagaaggtgaaggcggaaacggcaccgtatttgcagaaacgctggcaggagctggccgaccacccgttggtgggcgaagcgcgcggggtcggcatggtcgccgccctggagctggtcaagaacaagaagacccgcgagcgtttcaccgacaagggcgtcgggatgctgtgccgggaacattgtttccgcaacggtttgatcatgcgcgcggtgggcgacactatgattatctcgccgccgctggtgatcgatccgtcgcagatcgatgagttgatcaccctggcgcgcaagtgcctcgatcagaccgccgccgccgtcctggcttga

SEQ ID NO: 86 - protein, 456 aa, Pseudomonas aeruginosa
MNSQITNAKTREWQALSRDHHLPPFTDYKQLNEKGARIITKAEGVYIWDSEGNKILDAMAGLWCVNVGYGREELVQAATRQMRELPFYNLFFQTAHPPVVELAKAIADVAPEGMNHVFFTGSGSEANDTVLRMVRHYWATKGQPQKKVVIGRWNGYHGSTVAGVSLGGMKALHEQGDFPIPGIVHIAQPYWYGEGGDMSPDEFGVWAAEQLEKKILEVGEENVAAFIAEPIQGAGGVIVPPDTYWPKIREILAKYDILFIADEVICGFGRTGEWFGSQYYGNAPDLMPIAKGLTSGYIPMGGVVVRDEIVEVLNQGGEFYHGFTYSGHPVAAAVALENIRILREEKIIEKVKAETAPYLQKRWQELADHPLVGEARGVGMVAALELVKNKKTRERFTDKGVGMLCREHCFRNGLIMRAVGDTMIISPPLVIDPSQIDELITLARKCLDQTAAAVLA

SEQ ID NO: 87 - DNA, 70 bp, Artificial
  Primer
ggggacaagtttgtacaaaaaagcaggctaggaggaattaaccatgaacagccaaatcaccaacgccaag

SEQ ID NO: 88 - DNA, 49 bp, Artificial
  Primer
ggggaccactttgtacaagaaagctgggttcaagccaggacggcggcgg

SEQ ID NO: 89 - DNA, 849 bp, Bacillus subtilis
  CDS (1)..(849)
atgaaggttttagtcaatggccggctgattgggcgcagtgaagcatcaatcgatttggaagatcgcggttatcagtttggtgacggcatctatgaagtgatcagggtgtacaaaggagtattgttcggcttacgtgagcatgcagagcgttttttcagaagtgctgctgaaatcggaatttcactgccattcagtatagaagatctcgagtgggacctgcaaaagcttgtacaggaaaatgcggtcagtgagggagcggtatacattcagacaacaagaggtgtggccccgcgaaaacaccagtatgaagccggcctcgagccgcagactactgcctatacgtttacggtgaaaaaaccggagcaagagcaggcatacggagtggcggccattacagatgaggatcttcgctggttaagatgtgatatcaaaagtctgaatttactgtataatgtcatgacgaagcaaagggcctatgaagccggagcatttgaagccattttacttagggacggcgttgttacggagggtacatcctctaacgtttatgccgttatcaacggcacagtgcgaacacatccggctaatcggctcattctcaatggaattacacggatgaatattttaggactgattgagaagaatgggatcaaactggatgagactcctgtcagtgaagaagagttgaaacaggcggaagagatctttatttcgtcaacgacggcagaaattattccggtcgtgacgctcgatggacaatcgatcggaagcgggaaacccggaccggtgaccaaacagcttcaggctgcttttcaagaaagcattcaacaggctgctagcatttcataa

SEQ ID NO: 90 - protein, 282 aa, Bacillus subtilis
MKVLVNGRLIGRSEASIDLEDRGYQFGDGIYEVIRVYKGVLFGLREHAERFFRSAAEIGISLPFSIEDLEWDLQKLVQENAVSEGAVYIQTTRGVAPRKHQYEAGLEPQTTAYTFTVKKPEQEQAYGVAAITDEDLRWLRCDIKSLNLLYNVMTKQRAYEAGAFEAILLRDGVVTEGTSSNVYAVINGTVRTHPANRLILNGITRMNILGLIEKNGIKLDETPVSEEELKQAEEIFISSTTAEIIPVVTLDGQSIGSGKPGPVTKQLQAAFQESIQQAASIS

SEQ ID NO: 91 - DNA, 1347 bp, Bacillus subtilis
  CDS (1)..(1347)
atgactcatgatttgatagaaaaaagtaaaaagcacctctggctgccatttacccaaatgaaagattatgatgaaaaccccttaatcatcgaaagcgggactggaatcaaagtcaaagacataaacggcaaggaatactatgacggtttttcatcggtttggcttaatgtccacggacaccgcaaaaaagaactagatgacgccataaaaaaacagctcggaaaaattgcgcactccacgttattgggcatgaccaatgttccagcaacccagcttgccgaaacattaatcgacatcagcccaaaaaagctcacgcgggtcttttattcagacagcggcgcagaggcgatggaaatagccctaaaaatggcgtttcagtattggaagaacatcgggaagcccgagaaacaaaaattcatcgcaatgaaaaacgggtatcacggtgatacgattggcgccgtcagtgtcggttcaattgagctttttcaccacgtatacggcccgttgatgttcgagagttacaaggccccgattccttatgtgtatcgttctgaaagcggtgatcctgatgagtgccgtgatcagtgcctccgagagcttgcacagctgcttgaggaacatcatgaggaaattgccgcgctttccattgaatcaatggtacaaggcgcgtccggtatgatcgtgatgccggaaggatatttggcaggcgtgcgcgagctatgtacaacatacgatgtcttaatgatcgttgatgaagtcgctacaggctttggccgtacaggaaaaatgtttgcgtgcgagcacgagaatgtccagcctgatctgatggctgccggtaaaggcattacaggaggctatttgccaattgccgttacgtttgccactgaagacatctataaggcattctatgatgattatgaaaacctaaaaacctttttccatggccattcctatacaggcaatcagcttggctgtgcggttgcgcttgaaaatctggcattatttgaatctgaaaacattgtggaacaagtagcggaaaaaagtaaaaagctccattttcttcttcaagatctgcacgctcttcctcatgttggggatattcggcagcttggctttatgtgcggtgcagagcttgtacgatcaaaggaaactaaagaaccttacccggctgatcggcggattggatacaaagtttccttaaaaatgagagagttaggaatgctgacaagaccgcttggggacgtgattgcatttcttcctcctcttgccagcacagctgaagagctctcggaaatggttgccattatgaaacaagcgatccacgaggttacgagccttgaagattga

SEQ ID NO: 92 - protein, 448 aa, Bacillus subtilis
MTHDLIEKSKKHLWLPFTQMKDYDENPLIIESGTGIKVKDINGKEYYDGFSSVWLNVHGHRKKELDDAIKKQLGKIAHSTLLGMTNVPATQLAETLIDISPKKLTRVFYSDSGAEAMEIALKMAFQYWKNIGKPEKQKFIAMKNGYHGDTIGAVSVGSIELFHHVYGPLMFESYKAPIPYVYRSESGDPDECRDQCLRELAQLLEEHHEEIAALSIESMVQGASGMIVMPEGYLAGVRELCTTYDVLMIVDEVATGFGRTGKMFACEHENVQPDLMAAGKGITGGYLPIAVTFATEDIYKAFYDDYENLKTFFHGHSYTGNQLGCAVALENLALFESENIVEQVAEKSKKLHFLLQDLHALPHVGDIRQLGFMCGAELVRSKETKEPYPADRRIGYKVSLKMRELGMLTRPLGDVIAFLPPLASTAEELSEMVAIMKQAIHEVTSLED

SEQ ID NO: 93 - DNA, 1467 bp, Rhodobacter sphaeroides
  CDS (1)..(1467)
atgcccggttgcgggggcttgcccgggaatgaaccgaaatgcggacgagaggggaggtcggcgatgacgcggaatgacgcgacgaatgctgccggagcggtgggcgcggcgatgcgggatcacatcctcttgcctgcacaggaaatggcgaagctcggcaagtccgcgcagccggtgctgactcatgccgagggcatctatgtccataccgaggacggccgccgcctgatcgacgggccggcgggcatgtggtgcgcgcaggtgggctacggccgccgcgagatcgtcgatgccatggcgcatcaggcgatggtgctgccctatgcctcgccctggtatatggccacgagccccgcggcgcggctggcggagaagatcgccacgctgacgccgggcgatctcaaccggatctttttcaccacgggcgggtcgaccgcggtggacagcgcgctgcgcttctcggaattctacaacaacgtgctgggccggccgcagaagaagcgcatcatcgtgcgctacgacggctatcacggctcgacggcgctcaccgccgcctgcaccggccgcaccggcaactggccgaacttcgacatcgcgcaggaccggatctcgttcctctcgagccccaatccgcgccacgccggcaaccgcagccaggaggcgttcctcgacgatctggtgcaggaattcgaggaccggatcgagagcctcggccccgacacgatcgcggccttcctggccgagccgatcctcgcctcgggcggcgtcattattccgcccgcaggctatcatgcgcgcttcaaggcgatctgcgagaagcacgacatcctctatatctcggacgaggtggtgacgggcttcggccgttgcggcgagtggttcgcctcggagaaggtgttcggggtggtgccggacatcatcaccttcgccaagggcgtgacctcgggctatgtgccgctcggcggccttgcgatctccgaggcggtgctggcgcggatctcgggcgagaatgccaagggaagctggttcaccaacggctatacctacagcaatcagccggtggcctgcgccgcggcgcttgccaacatcgagctgatggagcgcgagggcatcgtcgatcaggcgcgcgagatggcggactatttcgccgcggcgctggcttcgctgcgcgatctgccgggcgtggcggaaacccggtcggtgggcctcgtgggttgcgtgcaatgcctgctcgacccgacccgggcggacggcacggccgaggacaaggccttcaccctgaagatcgacgagcgctgcttcgagctcgggctgatcgtgcgcccgctgggcgatctctgcgtgatctcgccgccgctcatcatctcgcgcgcgcagatcgacgagatggtcgcgatcatgcggcaggccatcaccgaagtgagcgccgcccacggtctgaccgcgaaagaaccggccgccgtctga

SEQ ID NO: 94 - protein, 488 aa, Rhodobacter sphaeroides
MPGCGGLPGNEPKCGREGRSAMTRNDATNAAGAVGAAMRDHILLPAQEMAKLGKSAQPVLTHAEGIYVHTEDGRRLIDGPAGMWCAQVGYGRREIVDAMAHQAMVLPYASPWYMATSPAARLAEKIATLTPGDLNRIFFTTGGSTAVDSALRFSEFYNNVLGRPQKKRIIVRYDGYHGSTALTAACTGRTGNWPNFDIAQDRISFLSSPNPRHAGNRSQEAFLDDLVQEFEDRIESLGPDTIAAFLAEPILASGGVIIPPAGYHARFKAICEKHDILYISDEVVTGFGRCGEWFASEKVFGVVPDIITFAKGVTSGYVPLGGLAISEAVLARISGENAKGSWFTNGYTYSNQPVACAAALANIELMEREGIVDQAREMADYFAAALASLRDLPGVAETRSVGLVGCVQCLLDPTRADGTAEDKAFTLKIDERCFELGLIVRPLGDLCVISPPLIISRAQIDEMVAIMRQAITEVSAAHGLTAKEPAAV

SEQ ID NO: 95 - DNA, 837 bp, Legionella pneumophila
  CDS (1)..(837)
atgagtatcgcatttgttaacggcaagtattgttgtcaatctgaagcaaaaatttcaatatttgatcgagggtttctttttggtgactcggtttatgaagtgctgcctgtttaccatgggcagccttactttgtagaccaacatcttgaccgattattctcaaatatgaaaaaaattaagatgattataccaaattatgattggcatggtttaattcatagactaatatcagaaaataatggcggtaatttacaagtatatatccaagtcacacgagggaatcaaggggtgcgcaagcatgatatccctacttccatcacaccttctgttatcgcattcactatgcataatccatttcccaccctcgaagataaggaacagggaatgtcagcaaaactggttgaagattttcggtggatgagatgtgatataaaaactacttctttaattgccaatatattactgaatgatgaggctgtatctgcaggattccacactgcaattcttgcccggaacggtctaattacagagggaagtagtaccaacgtatttattgtcgcacaggatggtgttattaagacaccacccatgaataatttctgtttaccaggaattactcggcaagttgttattgaaataattaaaaaattagatttaaagttcagagaaatagaaattagcatttcagagcttttttctgctcaggaagtttggataacaagtacgacaaaagaagtattccctattacaaagattaatgactctttgattaatggcggaaaagttggcgaatattggcggataattaatgattcctaccaacaactagtaaactaa

SEQ ID NO: 96 - protein, 278 aa, Legionella pneumophila
MSIAFVNGKYCCQSEAKISIFDRGFLFGDSVYEVLPVYHGQPYFVDQHLDRLFSNMKKIKMIIPNYDWHGLIHRLISENNGGNLQVYIQVTRGNQGVRKHDIPTSITPSVIAFTMHNPFPTLEDKEQGMSAKLVEDFRWMRCDIKTTSLIANILLNDEAVSAGFHTAILARNGLITEGSSTNVFIVAQDGVIKTPPMNNFCLPGITRQVVIEIIKKLDLKFREIEISISELFSAQEVWITSTTKEVFPITKINDSLINGGKVGEYWRIINDSYQQLVN

SEQ ID NO: 97 - DNA, 861 bp, Nitrosomonas europaea
  CDS (1)..(861)
atgatttacctcaatggcaaatttctgccgatggaacaggctaccgttccagtgctggatagaggcttcatcttcggtgatggtgtctatgaagtcataccggtttattcacgtaaaccgttccggctgggcgaacatctttcccggctgcagcacagtctggatggcatacgtctccagaatccgcacactgaagaacaatgggctggtctgatcgaacgcatcatcgagctgaatgaaggtgatgatcagtacctttacctgcacattacacgcggggtggcaaaacgtgaccatgcctttcctcgcgaagtaacgcccactgtcttcatcatgagcaacccgcttccggctccacctgcaaaattgctcgtttccggagtttcagcgattaccgccagggataatcgctgggggcgctgtgatatcaaagccatttcactgttgccaaatatcttattgcgccagcttgccgtggacgcacaagccatggaaacgatcctgttacgcgatggtctgttgaccgaaggggccgccagcaatattttcatcgtaaaagacgacctgctgctgaccccccccaaagatcaccgtatattgcctggcattacttatgatgtagtactggaactggctgaaacacatggtgttccacatgcgacaagagaaatatcagagcttgagttacgtactgcacgggaaatcatgctgacttcttccaccaaagaaattctcccgatcacacagctggatggacaaccgatcggtaatggcaccccagggccagtatttcagcaactggatcggctctatcaggcatataagctggaagtcatgcgcgggcatgctccacgccagtaa

SEQ ID NO: 98 - protein, 286 aa, Nitrosomonas europaea
MIYLNGKFLPMEQATVPVLDRGFIFGDGVYEVIPVYSRKPFRLGEHLSRLQHSLDGIRLQNPHTEEQWAGLIERIIELNEGDDQYLYLHITRGVAKRDHAFPREVTPTVFIMSNPLPAPPAKLLVSGVSAITARDNRWGRCDIKAISLLPNILLRQLAVDAQAMETILLRDGLLTEGAASNIFIVKDDLLLTPPKDHRILPGITYDVVLELAETHGVPHATREISELELRTAREIMLTSSTKEILPITQLDGQPIGNGTPGPVFQQLDRLYQAYKLEVMRGHAPRQ

SEQ ID NO: 99 - DNA, 1293 bp, Neisseria gonorrhoeae
  CDS (1)..(1293)
atgaggataaatatgaaccgtaacgaaattttattcgaccgcgccaaggccatcatccccggcggcgtgaattcgcccgtgcgcgcattcggcagcgtcggcggcgtgccgcgcttcatcaaaaaagccgaaggcgcgtatgtttgggacgaaaacggcacgcgctacaccgattatgtcggctcttgggggcctgcgattgtcggacacgcgcatcccgaagtcgtcgaagccgtgcgcgaagctgcgttgggcggtttgtcgttcggcgcgcccaccgaaggcgaaatcgccattgccgaacaaattgccgaaattatgccgtctgtcgaacggctgcgcctcgtcagctccggcacggaagcgacgatgactgccatccgtctggcacgcggttttaccggccgcgacaaaatcatcaaatttgaaggctgctaccacggccattccgacagcctgttggtgaaagcaggcagcggtctgcttaccttcggcaatccttcttccgccggtgtgcctgccgactttaccaaacatactttggtactcgaatacaacaacatcgcccaactcgaagaagcctttgcccaaagcggcgacgaaatcgcctgcgtgattgtcgaacccttcgtcggcaatatgaacctcgtccgcccgaccgaagcctttgtcaaagccttgcgcggattgaccgaaaaacacggcgcggtgttgatttacgacgaagtgatgaccggtttccgcgtcgcgctcggcggcgcgcagtcgctgcacggcatcacgcccgacctgaccacgatgggcaaagtcatcggcggcggtatgccgcttgccgcgttcggcggacgcaaagacatcatggaatgtatttccccgttgggcggcgtgtatcaggcaggtacattatcaggcaacccgattgccgtcgccgccggcttgaaaacgctggaaatcatccagcgcgaaggcttctatgaaaacctgaccgccttgacacaacgccttgccaacggtattgccgccgccaaagcgcacggtatcgagtttgccgccgacagcgtgggcggtatgttcggtctgtatttcgccgcacacgtgccgcgaaactatgccgatatggcgcgctccaatatcgacgctttcaaacgcttcttccacggcatgctcgaccgcggcattgccttcggcccgtccgcttatgaagcgggtttcgtttccgccgcgcatacgcccgagctgattgacgaaacggttgcggttgcggttgaagtgttcaaggcgatggctgcatga

SEQ ID NO: 100 - protein, 430 aa, Neisseria gonorrhoeae
MRINMNRNEILFDRAKAIIPGGVNSPVRAFGSVGGVPRFIKKAEGAYVWDENGTRYTDYVGSWGPAIVGHAHPEVVEAVREAALGGLSFGAPTEGEIAIAEQIAEIMPSVERLRLVSSGTEATMTAIRLARGFTGRDKIIKFEGCYHGHSDSLLVKAGSGLLTFGNPSSAGVPADFTKHTLVLEYNNIAQLEEAFAQSGDEIACVIVEPFVGNMNLVRPTEAFVKALRGLTEKHGAVLIYDEVMTGFRVALGGAQSLHGITPDLTTMGKVIGGGMPLAAFGGRKDIMECISPLGGVYQAGTLSGNPIAVAAGLKTLEIIQREGFYENLTALTQRLANGIAAAKAHGIEFAADSVGGMFGLYFAAHVPRNYADMARSNIDAFKRFFHGMLDRGIAFGPSAYEAGFVSAAHTPELIDETVAVAVEVFKAMAA

SEQ ID NO: 101 - DNA, 924 bp, Pseudomonas aeruginosa
  CDS (1)..(924)
atgtcgatggccgatcgtgatggcgtgatctggtatgacggtgaactggtgcagtggcgcgacgcgaccacgcacgtgctgacccataccctgcactatggaatgggcgtgttcgagggcgtgcgcgcctacgacaccccgcagggcacggcgatcttccgcctgcaggcgcataccgaccggctgttcgactccgcgcacatcatgaacatgcagatcccgtacagccgcgacgagatcaacgaggcgacccgcgccgccgtgcgcgagaacaacctggaaagcgcctatatccgcccgatggtgttctacggaagcgaaggcatgggcctgcgcgccagcggcctgaaggtccatgtgatcatcgccgcctggagctggggcgcctacatgggcgaggaagccctgcagcaaggcatcaaggtgcgcaccagttccttcacccgccaccacgtcaacatctcgatgacccgcgccaagtccaacggcgcctacatcaactcgatgctggccctccaggaagcgatctccggcggcgccgacgaggccatgatgctcgatccggaaggctacgtggccgaaggctccggcgagaacatcttcatcatcaaggatggcgtgatctacaccccggaagtcaccgcctgcctgaacggcatcactcgtaacactatcctgaccctggccgccgaacacggttttaaactggtcgagaagcgcatcacccgcgacgaggtgtacatcgccgacgaggccttcttcactggcactgccgcggaagtcacgccgatccgcgaagtggacggtcgcaagatcggcgccggccgccgtggcccggtcaccgaaaagctgcagaaagcctatttcgacctggtcagcggcaagaccgaggcccacgccgagtggcgtaccctggtcaagtaa

SEQ ID NO: 102 - protein, 307 aa, Pseudomonas aeruginosa
MSMADRDGVIWYDGELVQWRDATTHVLTHTLHYGMGVFEGVRAYDTPQGTAIFRLQAHTDRLFDSAHIMNMQIPYSRDEINEATRAAVRENNLESAYIRPMVFYGSEGMGLRASGLKVHVIIAAWSWGAYMGEEALQQGIKVRTSSFTRHHVNISMTRAKSNGAYINSMLALQEAISGGADEAMMLDPEGYVAEGSGENIFIIKDGVIYTPEVTACLNGITRNTILTLAAEHGFKLVEKRITRDEVYIADEAFFTGTAAEVTPIREVDGRKIGAGRRGPVTEKLQKAYFDLVSGKTEAHAEWRTLVK

SEQ ID NO: 103 - DNA, 1407 bp, Rhodopseudomonas palustris
  CDS (1)..(1407)
atgaagctgataccgtgccgcgcctttcaccccccggccgcgcagtgcatgaggagcgccatgttagacaagatcaagcccacgtccgccgtcaacgcgccgaacgatctcaacgcgttctggatgccgttcaccgcgaaccgggccttcaagcgcgcgccgaagatggtcgtgggtgccgaaggcatgcactacatcaccgccgatggtcgcaagatcatcgacgccgcctcgggcatgtggtgcaccaatgcgggccatggccgcaaggaaatcgccgaggcgatcaaggcgcaggccgatgaactcgacttctcgccgccgttccagttcggccagccgaaggcgttcgaactcgccagccggatcgccgatctggcgccggaaggcctcgatcacgtgttcttctgcaattcgggctcggaagccggcgacaccgcgctgaagatcgcggtcgcctatcagcagatcaagggccagggctcacgcacccgcctgatcggccgcgagcgcggctatcacggcgtcggcttcggcggcaccgcggtcggcggcatcggcaacaaccgcaagatgttcggtccgctgctcaacggcgtcgatcatctgcctgcgacttatgatcgcgacaagcaggctttcaccatcggcgagccggaatacggcgcgcacttcgccgaagcgcttgaaggcctcgtcaatctgcacggcgccaacaccatcgcggcggtgatcgtcgagccgatggccggctccaccggcgtgctgccggcgccgaagggctatctcaagaagctgcgcgagatcaccaagaagcacggcatcctgctgatcttcgacgaggtcatcaccggctacggccgtctcggctatgccttcgcgtccgaacgttacggcgtcaccccggacatgatcaccttcgccaagggcgtcaccaatggtgcggtgccgatgggcggcgtgatcacctcggcggagatccacgatgcgttcatgaccggccccgagcacgcggtcgagctggcgcacggctacacctattcggcgcatccgctcgcctgcgcggccggcatcgccaccctcgacatctaccgcgacgagaagctgttcgagcgcgccaaggcgctggagccgaagtttgccgaggcggtgatgtcgctgaagtcggccccgaacgtggtcgacatccgcaccgtcggcctgacggcgggtatcgacctcgcttcgatcgccgatgcggtcggcaagcgtggcttcgaagcgatgaatgccggcttccacgaccacgagctgatgctgcggatcgccggcgacaccctggcgctgaccccgccgctgatcctcagcgaggaccacatcggtgagatcgtcgacaaggtcggcaaggtgatccgcgcggtcgcctga

SEQ ID NO: 104 - protein, 468 aa, Rhodopseudomonas palustris
MKLIPCRAFHPPAAQCMRSAMLDKIKPTSAVNAPNDLNAFWMPFTANRAFKRAPKMVVGAEGMHYITADGRKIIDAASGMWCTNAGHGRKEIAEAIKAQADELDFSPPFQFGQPKAFELASRIADLAPEGLDHVFFCNSGSEAGDTALKIAVAYQQIKGQGSRTRLIGRERGYHGVGFGGTAVGGIGNNRKMFGPLLNGVDHLPATYDRDKQAFTIGEPEYGAHFAEALEGLVNLHGANTIAAVIVEPMAGSTGVLPAPKGYLKKLREITKKHGILLIFDEVITGYGRLGYAFASERYGVTPDMITFAKGVTNGAVPMGGVITSAEIHDAFMTGPEHAVELAHGYTYSAHPLACAAGIATLDIYRDEKLFERAKALEPKFAEAVMSLKSAPNVVDIRTVGLTAGIDLASIADAVGKRGFEAMNAGFHDHELMLRIAGDTLALTPPLILSEDHIGEIVDKVGKVIRAVA

SEQ ID NO: 105 - DNA, 1263 bp, Escherichia coli
  CDS (1)..(1263)
atgccacattcactgttcagcaccgataccgatctcaccgccgaaaatctgctgcgtttgcccgctgaatttggctgcccggtgtgggtctacgatgcgcaaattattcgtcggcagattgcagcgctgaaacagtttgatgtggtgcgctttgcacagaaagcctgttccaatattcatattttgcgcttaatgcgtgagcagggcgtgaaagtggattccgtctcgttaggcgaaatagagcgtgcgttggcggcgggttacaatccgcaaacgcaccccgatgatattgtttttacggcagatgttatcgatcaggcgacgcttgaacgcgtcagtgaattgcaaattccggtgaatgcgggttctgttgatatgctcgaccaactgggccaggtttcgccagggcatcgggtatggctgcgcgttaatccggggtttggtcacggacatagccaaaaaaccaataccggtggcgaaaacagcaagcacggtatctggtacaccgatctgcccgccgcactggacgtgatacaacgtcatcatctgcagctggtcggcattcacatgcacattggttctggcgttgattatgcccatctggaacaggtgtgtggtgctatggtgcgtcaggtcatcgaattcggtcaggatttacaggctatttctgcgggcggtgggctttctgttccttatcaacagggtgaagaggcggttgataccgaacattattatggtctgtggaatgccgcgcgtgagcaaatcgcccgccatttgggccaccctgtgaaactggaaattgaaccgggtcgcttcctggtagcgcagtctggcgtattaattactcaggtgcggagcgtcaaacaaatggggagccgccactttgtgctggttgatgccgggttcaacgatctgatgcgcccggcaatgtacggtagttaccaccatatcagtgccctggcagctgatggtcgttctctggaacacgcgccaacggtggaaaccgtcgtcgccggaccgttatgtgaatcgggcgatgtctttacccagcaggaagggggaaatgttgaaacccgcgccttgccggaagtgaaggcaggtgattatctggtactgcatgatacaggggcatatggcgcatcaatgtcatccaactacaatagccgtccgctgttaccagaagttctgtttgataatggtcaggcgcggttgattcgccgtcgccagaccatcgaagaattactggcgctggaattgctttaa

SEQ ID NO: 106 - protein, 420 aa, Escherichia coli
MPHSLFSTDTDLTAENLLRLPAEFGCPVWVYDAQIIRRQIAALKQFDVVRFAQKACSNIHILRLMREQGVKVDSVSLGEIERALAAGYNPQTHPDDIVFTADVIDQATLERVSELQIPVNAGSVDMLDQLGQVSPGHRVWLRVNPGFGHGHSQKTNTGGENSKHGIWYTDLPAALDVIQRHHLQLVGIHMHIGSGVDYAHLEQVCGAMVRQVIEFGQDLQAISAGGGLSVPYQQGEEAVDTEHYYGLWNAAREQIARHLGHPVKLEIEPGRFLVAQSGVLITQVRSVKQMGSRHFVLVDAGFNDLMRPAMYGSYHHISALAADGRSLEHAPTVETVVAGPLCESGDVFTQQEGGNVETRALPEVKAGDYLVLHDTGAYGASMSSNYNSRPLLPEVLFDNGQARLIRRRQTIEELLALELL

SEQ ID NO: 107 - DNA, 1265 bp, Artificial
  Escherichia.coli diaminopimelate decarboxylase LysA codon optimised gene
atatgccacactctctgttttctactgatactgatctgactgcggaaaacctgctgcgtctgccggctgaattcggttgtccggtatgggtgtacgacgctcagattattcgtcgccagatcgcagcactgaagcagttcgatgtagtgcgttttgcacagaaggcgtgctccaacatccatatcctgcgcctgatgcgtgagcagggcgttaaagttgactccgtctctctgggtgagattgagcgcgccctggcagccggctataacccacagacccatcctgacgacattgtatttactgccgacgtgatcgaccaggctactctggaacgcgtttctgaactgcagatcccggttaatgctggttctgtggacatgctggaccagctgggccaggtatccccaggtcatcgtgtgtggctgcgtgtcaacccaggtttcggccacggccactctcagaaaactaacactggtggtgagaactccaagcatggcatttggtataccgatctgccggctgcactggacgtaatccagcgtcaccacctgcagctggtgggcatccacatgcacattggctccggcgtagactacgcccacctggagcaagtctgcggtgctatggtacgtcaggtaatcgagttcggccaagatctgcaggcaatcagcgctggtggcggcctgtctgtaccttatcagcagggcgaggaggcggttgacactgagcactactacggtctgtggaacgccgctcgtgagcaaattgcacgtcacctgggccacccggtgaaactggagatcgagccgggccgcttcctggtagcacagtccggcgtactgattacccaggtacgctctgttaaacagatgggctcccgtcactttgtgctggtagacgcaggcttcaacgacctgatgcgtccggctatgtatggttcctatcatcacatctctgcgctggccgccgacggccgctctctggaacacgcgccgacggttgaaacggtggtggctggtccgctgtgcgagtccggcgacgttttcactcagcaggagggcggcaatgtagagacgcgtgcgctgccggaagtgaaagccggtgattatctggtgctgcatgataccggcgcctatggtgcgagcatgagcagcaactacaactctcgcccgctgctgccggaggtcctgttcgataacggccaagcccgcctgatccgtcgtcgtcagaccatcgaggaactgctggcactggagctgctgtaa

SEQ ID NO: 108 - DNA, 1692 bp, Saccharomyces cerevisiae
  CDS (1)..(1692)
atgtctgaaattactttgggtaaatatttgttcgaaagattaaagcaagtcaacgttaacaccgttttcggtttgccaggtgacttcaacttgtccttgttggacaagatctacgaagttgaaggtatgagatgggctggtaacgccaacgaattgaacgctgcttacgccgctgatggttacgctcgtatcaagggtatgtcttgtatcatcaccaccttcggtgtcggtgaattgtctgctttgaacggtattgccggttcttacgctgaacacgtcggtgttttgcacgttgttggtgtcccatccatctctgctcaagctaagcaattgttgttgcaccacaccttgggtaacggtgacttcactgttttccacagaatgtctgccaacatttctgaaaccactgctatgatcactgacattgctaccgccccagctgaaattgacagatgtatcagaaccacttacgtcacccaaagaccagtctacttaggtttgccagctaacttggtcgacttgaacgtcccagctaagttgttgcaaactccaattgacatgtctttgaagccaaacgatgctgaatccgaaaaggaagtcattgacaccatcttggctttggtcaaggatgctaagaacccagttatcttggctgatgcttgttgttccagacacgacgtcaaggctgaaactaagaagttgattgacttgactcaattcccagctttcgtcaccccaatgggtaagggttccattgacgaacaacacccaagatacggtggtgtttacgtcggtaccttgtccaagccagaagttaaggaagccgttgaatctgctgacttgattttgtctgtcggtgctttgttgtctgatttcaacaccggttctttctcttactcttacaagaccaagaacattgtcgaattccactccgaccacatgaagatcagaaacgccactttcccaggtgtccaaatgaaattcgttttgcaaaagttgttgaccactattgctgacgccgctaagggttacaagccagttgctgtcccagctagaactccagctaacgctgctgtcccagcttctaccccattgaagcaagaatggatgtggaaccaattgggtaacttcttgcaagaaggtgatgttgtcattgctgaaaccggtacctccgctttcggtatcaaccaaaccactttcccaaacaacacctacggtatctctcaagtcttatggggttccattggtttcaccactggtgctaccttgggtgctgctttcgctgctgaagaaattgatccaaagaagagagttatcttattcattggtgacggttctttgcaattgactgttcaagaaatctccaccatgatcagatggggcttgaagccatacttgttcgtcttgaacaacgatggttacaccattgaaaagttgattcacggtccaaaggctcaatacaacgaaattcaaggttgggaccacctatccttgttgccaactttcggtgctaaggactatgaaacccacagagtcgctaccaccggtgaatgggacaagttgacccaagacaagtctttcaacgacaactctaagatcagaatgattgaaatcatgttgccagtcttcgatgctccacaaaacttggttgaacaagctaagttgactgctgctaccaacgctaagcaataa

SEQ ID NO: 109 - protein, 563 aa, Saccharomyces cerevisiae
MSEITLGKYLFERLKQVNVNTVFGLPGDFNLSLLDKIYEVEGMRWAGNANELNAAYAADGYARIKGMSCIITTFGVGELSALNGIAGSYAEHVGVLHVVGVPSISAQAKQLLLHHTLGNGDFTVFHRMSANISETTAMITDIATAPAEIDRCIRTTYVTQRPVYLGLPANLVDLNVPAKLLQTPIDMSLKPNDAESEKEVIDTILALVKDAKNPVILADACCSRHDVKAETKKLIDLTQFPAFVTPMGKGSIDEQHPRYGGVYVGTLSKPEVKEAVESADLILSVGALLSDFNTGSFSYSYKTKNIVEFHSDHMKIRNATFPGVQMKFVLQKLLTTIADAAKGYKPVAVPARTPANAAVPASTPLKQEWMWNQLGNFLQEGDVVIAETGTSAFGINQTTFPNNTYGISQVLWGSIGFTTGATLGAAFAAEEIDPKKRVILFIGDGSLQLTVQEISTMIRWGLKPYLFVLNNDGYTIEKLIHGPKAQYNEIQGWDHLSLLPTFGAKDYETHRVATTGEWDKLTQDKSFNDNSKIRMIEIMLPVFDAPQNLVEQAKLTAATNAKQ

SEQ ID NO: 110 - DNA, 1692 bp, Artificial
  Saccharomyces cerevisiae pyruvate decarboxylase Pdc codon optimised gene
atgtccgagatcactctgggcaaatacctgtttgaacgtctgaaacaggtgaacgttaataccgtattcggcctgccgggtgatttcaacctgtccctgctggacaaaatctatgaagttgaaggtatgcgttgggctggcaacgctaacgagctgaacgcagcgtacgcggcagatggttacgctcgtatcaaaggtatgtcttgtatcatcaccaccttcggtgttggtgagctgagcgccctgaacggcatcgccggctcctatgcagagcacgtgggcgtgctgcacgttgtgggtgtaccgtccatcagcgcccaggcaaaacagctgctgctgcaccacaccctgggtaacggcgactttaccgttttccatcgtatgtctgcgaacatcagcgaaactactgcaatgattactgacatcgctacggcaccggcagaaatcgaccgttgcattcgtaccacgtacgttactcagcgcccggtttatctgggcctgccagccaacctggtggatctgaacgtcccggctaaactgctgcagactccgatcgatatgtctctgaaacctaacgacgcagaatctgagaaagaagttatcgatactattctggctctggtgaaagatgcaaagaacccagttatcctggctgacgcatgttgctctcgtcatgatgtaaaggcagaaaccaaaaagctgatcgacctgacgcagttcccggcgttcgttaccccgatgggcaagggttccatcgatgagcagcacccgcgttatggtggtgtatacgttggcacgctgtccaaaccggaggtaaaagaagcggttgaaagcgcagatctgatcctgtctgttggtgcactgctgagcgacttcaacaccggttctttctcctatagctacaagaccaaaaacattgtggagtttcactccgatcacatgaaaatccgcaacgcgacctttcctggtgtgcagatgaaattcgtactgcagaaactgctgaccaccatcgccgacgctgcgaaaggttataaaccggtagctgtgccggcacgtaccccggcgaacgccgcggttcctgcatccactccactgaagcaggaatggatgtggaatcagctgggtaatttcctgcaagaaggcgacgttgtaatcgcagaaaccggcactagcgcgtttggcattaaccagacgaccttcccaaacaacacctacggtatcagccaagtcctgtggggctctatcggcttcaccaccggtgcaaccctgggtgcggctttcgctgctgaggagatcgacccgaagaaacgtgttatcctgttcatcggtgacggctccctgcagctgaccgtccaggagatttctaccatgatccgctggggcctgaaaccgtacctgtttgtgctgaacaacgacggctacactattgagaaactgatccacggtccgaaagcacagtataatgagatccagggttgggatcatctgtctctgctgccgacctttggcgctaaagactacgagacccaccgcgtggctaccaccggcgagtgggataaactgacgcaggataaatccttcaatgacaatagcaagattcgtatgatcgaaatcatgctgccggtctttgatgctccgcagaacctggtagagcaagcaaaactgaccgcggcaactaacgctaaacagtaa

SEQ ID NO: 111 - DNA, 1707 bp, Zymomonas mobilis
  CDS (1)..(1707)
atgagttatactgtcggtacctatttagcggagcggcttgtccagattggtctcaagcatcacttcgcagtcgcgggcgactacaacctcgtccttcttgacaacctgcttttgaacaaaaacatggagcaggtttattgctgtaacgaactgaactgcggtttcagtgcagaaggttatgctcgtgccaaaggcgcagcagcagccgtcgttacctacagcgtcggtgcgctttccgcatttgatgctatcggtggcgcctatgcagaaaaccttccggttatcctgatctccggtgctccgaacaacaatgatcacgctgctggtcacgtgttgcatcacgctcttggcaaaaccgactatcactatcagttggaaatggccaagaacatcacggccgccgctgaagcgatttacaccccggaagaagctccggctaaaatcgatcacgtgattaaaactgctcttcgtgagaagaagccggtttatctcgaaatcgcttgcaacattgcttccatgccctgcgccgctcctggaccggcaagcgcattgttcaatgacgaagccagcgacgaagcttctttgaatgcagcggttgaagaaaccctgaaattcatcgccaaccgcgacaaagttgccgtcctcgtcggcagcaagctgcgcgcagctggtgctgaagaagctgctgtcaaatttgctgatgctctcggtggcgcagttgctaccatggctgctgcaaaaagcttcttcccagaagaaaacccgcattacatcggcacctcatggggtgaagtcagctatccgggcgttgaaaagacgatgaaagaagccgatgcggttatcgctctggctcctgtcttcaacgactactccaccactggttggacggatattcctgatcctaagaaactggttctcgctgaaccgcgttctgtcgtcgttaacggcattcgcttccccagcgtccatctgaaagactatctgacccgtttggctcagaaagtttccaagaaaaccggtgcattggacttcttcaaatccctcaatgcaggtgaactgaagaaagccgctccggctgatccgagtgctccgttggtcaacgcagaaatcgcccgtcaggtcgaagctcttctgaccccgaacacgacggttattgctgaaaccggtgactcttggttcaatgctcagcgcatgaagctcccgaacggtgctcgcgttgaatatgaaatgcagtggggtcacattggttggtccgttcctgccgccttcggttatgccgtcggtgctccggaacgtcgcaacatcctcatggttggtgatggttccttccagctgacggctcaggaagtcgctcagatggttcgcctgaaactgccggttatcatcttcttgatcaataactatggttacaccgccgaagttatgatccatgatggtccgtacaacaacatcaagaactgggattatgccggtctgatggaagtgttcaacggtaacggtggttatgacagcggtgctggtaaaggcctgaaggctaaaaccggtggcgaactggcagaagctatcaaggttgctctggcaaacaccgacggcccaaccctgatcgaatgcttcatcggtcgtgaagactgcactgaagaattggtcaaatggggtaagcgcgttgctgccgccaacagccgtaagcctgttaacaagctcctctag

SEQ ID NO: 112 - protein, 568 aa, Zymomonas mobilis
MSYTVGTYLAERLVQIGLKHHFAVAGDYNLVLLDNLLLNKNMEQVYCCNELNCGFSAEGYARAKGAAAAVVTYSVGALSAFDAIGGAYAENLPVILISGAPNNNDHAAGHVLHHALGKTDYHYQLEMAKNITAAAEAIYTPEEAPAKIDHVIKTALREKKPVYLEIACNIASMPCAAPGPASALFNDEASDEASLNAAVEETLKFIANRDKVAVLVGSKLRAAGAEEAAVKFADALGGAVATMAAAKSFFPEENPHYIGTSWGEVSYPGVEKTMKEADAVIALAPVFNDYSTTGWTDIPDPKKLVLAEPRSVVVNGIRFPSVHLKDYLTRLAQKVSKKTGALDFFKSLNAGELKKAAPADPSAPLVNAEIARQVEALLTPNTTVIAETGDSWFNAQRMKLPNGARVEYEMQWGHIGWSVPAAFGYAVGAPERRNILMVGDGSFQLTAQEVAQMVRLKLPVIIFLINNYGYTAEVMIHDGPYNNIKNWDYAGLMEVFNGNGGYDSGAGKGLKAKTGGELAEAIKVALANTDGPTLIECFIGREDCTEELVKWGKRVAAANSRKPVNKLL

SEQ ID NO: 113 - DNA, 1707 bp, Artificial
  Zymomonas mobilis pyruvate decarboxylase PdcI472A codon optimised gene
atgtcttatactgttggtacttatctggctgagcgtctggtgcaaatcggcctgaaacaccactttgcagttgctggcgactacaacctggttctgctggataacctgctgctgaacaaaaacatggagcaagtttattgctgtaacgagctgaactgcggcttctctgcggagggttatgcgcgtgcgaaaggtgccgctgcagcagtcgtaacctactctgtgggcgctctgtccgcgttcgacgcaatcggtggcgcttacgctgaaaacctgccggtgatcctgattagcggtgcgccgaataataacgaccatgctgctggccacgttctgcaccacgccctgggtaaaactgattaccattaccagctggagatggctaaaaacatcactgcagcagcagaagcgatctacaccccggaagaggctccggcaaaaatcgaccacgtgattaaaaccgctctgcgtgagaaaaagccggtatacctggaaatcgcgtgcaacatcgcgtctatgccgtgcgccgcaccgggtccggcttctgccctgttcaacgatgaggcgagcgatgaggcatctctgaacgcagcagtagaagaaaccctgaaatttatcgcaaaccgtgacaaagtagcagtcctggtaggttctaaactgcgtgcggctggtgcggaagaggctgcggtaaagttcgcggatgctctgggcggtgcagtggcgaccatggcagcggctaaatccttcttcccagaggagaacccgcattacattggtacctcctggggcgaagtttcctaccctggtgtggagaaaaccatgaaagaagccgatgctgtgattgccctggcgcctgtattcaacgattattccaccaccggttggaccgatatcccggacccgaagaaactggtcctggctgaaccgcgctccgtagtagtgaatggcattcgtttcccgtccgtacacctgaaggattacctgacgcgtctggcacagaaagtatccaagaaaactggcgcgctggacttctttaaatccctgaacgctggtgagctgaaaaaggcggctccggccgatccgtccgcaccgctggtgaacgcagagattgcacgtcaggttgaggcactgctgacgccgaacaccaccgtaatcgcggaaacgggcgactcttggttcaacgcacagcgcatgaaactgccgaacggtgcccgcgttgaatatgaaatgcagtggggtcacatcggctggtctgtcccagcagcgtttggttacgcggttggtgcaccggagcgtcgcaacatcctgatggtgggtgacggctccttccagctgactgctcaggaggtggcgcagatggtgcgcctgaagctgccggttatcattttcctgatcaacaactacggctacaccgccgaggtaatgatccacgatggtccgtacaacaacatcaaaaactgggactacgccggtctgatggaggtttttaacggtaacggcggttacgacagcggtgctggtaagggtctgaaagccaaaaccggtggcgaactggcagaggcgattaaagttgcgctggcaaacaccgatggcccgaccctgatcgagtgcttcatcggccgtgaggactgcaccgaggagctggtcaaatggggcaaacgtgtggcggctgctaactctcgcaagccggtaaacaaactgctgtaa

SEQ ID NO: 114 - DNA, 1644 bp, Lactococcus lactis
  CDS (1)..(1644)
atgtatacagtaggagattacctgttagaccgattacacgagttgggaattgaagaaatttttggagttcctggtgactataacttacaatttttagatcaaattatttcacgcgaagatatgaaatggattggaaatgctaatgaattaaatgcttcttatatggctgatggttatgctcgtactaaaaaagctgccgcatttctcaccacatttggagtcggcgaattgagtgcgatcaatggactggcaggaagttatgccgaaaatttaccagtagtagaaattgttggttcaccaacttcaaaagtacaaaatgacggaaaatttgtccatcatacactagcagatggtgattttaaacactttatgaagatgcatgaacctgttacagcagcgcggactttactgacagcagaaaatgccacatatgaaattgaccgagtactttctcaattactaaaagaaagaaaaccagtctatattaacttaccagtcgatgttgctgcagcaaaagcagagaagcctgcattatctttagaaaaagaaagctctacaacaaatacaactgaacaagtgattttgagtaagattgaagaaagtttgaaaaatgcccaaaaaccagtagtgattgcaggacacgaagtaattagttttggtttagaaaaaacggtaactcagtttgtttcagaaacaaaactaccgattacgacactaaattttggtaaaagtgctgttgatgaatctttgccctcatttttaggaatatataacgggaaactttcagaaatcagtcttaaaaattttgtggagtccgcagactttatcctaatgcttggagtgaagcttacggactcctcaacaggtgcattcacacatcatttagatgaaaataaaatgatttcactaaacatagatgaaggaataattttcaataaagtggtagaagattttgattttagagcagtggtttcttctttatcagaattaaaaggaatagaatatgaaggacaatatattgataagcaatatgaagaatttattccatcaagtgctcccttatcacaagaccgtctatggcaggcagttgaaagtttgactcaaagcaatgaaacaatcgttgctgaacaaggaacctcattttttggagcttcaacaattttcttaaaatcaaatagtcgttttattggacaacctttatggggttctattggatatacttttccagcggctttaggaagccaaattgcggataaagagagcagacaccttttatttattggtgatggttcacttcaacttaccgtacaagaattaggactatcaatcagagaaaaactcaatccaatttgttttatcataaataatgatggttatacagttgaaagagaaatccacggacctactcaaagttataacgacattccaatgtggaattactcgaaattaccagaaacatttggagcaacagaagatcgtgtagtatcaaaaattgttagaacagagaatgaatttgtgtctgtcatgaaagaagcccaagcagatgtcaatagaatgtattggatagaactagttttggaaaaagaagatgcgccaaaattactgaaaaaaatgggtaaattatttgctgagcaaaataaatag

SEQ ID NO: 115 - protein, 547 aa, Lactococcus lactis
MYTVGDYLLDRLHELGIEEIFGVPGDYNLQFLDQIISREDMKWIGNANELNASYMADGYARTKKAAAFLTTFGVGELSAINGLAGSYAENLPVVEIVGSPTSKVQNDGKFVHHTLADGDFKHFMKMHEPVTAARTLLTAENATYEIDRVLSQLLKERKPVYINLPVDVAAAKAEKPALSLEKESSTTNTTEQVILSKIEESLKNAQKPVVIAGHEVISFGLEKTVTQFVSETKLPITTLNFGKSAVDESLPSFLGIYNGKLSEISLKNFVESADFILMLGVKLTDSSTGAFTHHLDENKMISLNIDEGIIFNKVVEDFDFRAVVSSLSELKGIEYEGQYIDKQYEEFIPSSAPLSQDRLWQAVESLTQSNETIVAEQGTSFFGASTIFLKSNSRFIGQPLWGSIGYTFPAALGSQIADKESRHLLFIGDGSLQLTVQELGLSIREKLNPICFIINNDGYTVEREIHGPTQSYNDIPMWNYSKLPETFGATEDRVVSKIVRTENEFVSVMKEAQADVNRMYWIELVLEKEDAPKLLKKMGKLFAEQNK

SEQ ID NO: 116 - DNA, 1644 bp, Artificial
  Lactococcus lactis branched chain alpha-ketoacid decarboxylase KdcA codon optimised gene
atgtatactgttggtgattatctgctggaccgtctgcatgaactgggcattgaagaaatcttcggtgtcccaggcgactacaacctgcagttcctggaccagatcatctcccgcgaagatatgaaatggatcggtaacgcaaacgagctgaacgcgtcttatatggctgatggttatgctcgcaccaaaaaggctgcggcctttctgaccacctttggtgtgggcgagctgagcgcgatcaacggcctggcaggttcctacgctgagaacctgccggtagtagaaatcgttggttccccgacctctaaggttcagaacgacggcaaattcgtacatcacaccctggcggacggcgattttaagcactttatgaaaatgcacgaaccggtcaccgccgctcgcactctgctgaccgcggaaaacgcaacgtacgagatcgatcgtgtactgtcccagctgctgaaagaacgtaaaccggtgtatatcaatctgccggttgatgtcgctgcggccaaagcagagaaaccggcactgtccctggagaaggagagctccactactaacaccaccgaacaggttatcctgtccaaaattgaagaatctctgaaaaacgcacagaaaccggtggttatcgcaggtcacgaggttatctccttcggcctggagaaaactgttactcaattcgtctctgaaacgaaactgccgatcacgaccctgaactttggcaagtccgcagttgacgaatctctgccttctttcctgggcatttacaacggcaaactgtccgagatctccctgaagaacttcgtagaatccgctgactttatcctgatgctgggtgtgaaactgaccgactcctctaccggtgcgttcacgcaccatctggatgaaaacaaaatgatcagcctgaacatcgacgagggtatcatcttcaacaaggtagttgaagatttcgacttccgtgctgttgtcagcagcctgtccgagctgaaaggcattgagtacgagggtcaatacatcgataaacagtacgaagagtttattccgtcttctgcaccgctgagccaggaccgcctgtggcaggcagttgagtccctgacgcagtccaacgaaactatcgtagcggaacaaggtacctctttcttcggtgcttctaccatctttctgaagtccaactctcgctttatcggtcagccgctgtggggttctatcggttacacgttcccggctgcgctgggtagccagatcgctgataaagagtctcgtcatctgctgttcatcggtgatggttccctgcagctgactgtacaggaactgggtctgtctatccgtgaaaaactgaacccgatttgttttatcatcaataacgatggctacactgttgagcgtgaaattcatggtccgactcagtcttacaacgatattccgatgtggaactactctaaactgccggaaaccttcggtgcaactgaggatcgcgtcgtgagcaagattgtgcgtactgagaacgagttcgtatctgttatgaaagaggcgcaggcagatgtgaaccgcatgtactggatcgaactggttctggaaaaagaggatgcaccgaaactgctgaagaaaatgggtaaactgtttgcggagcagaacaagtaa

SEQ ID NO: 117 - DNA, 1647 bp, Lactococcus lactis
  CDS (1)..(1647)
atgtatacagtaggagattacctattagaccgattacacgagttaggaattgaagaaatttttggagtccctggagactataacttacaatttttagatcaaattatttcccacaaggatatgaaatgggtcggaaatgctaatgaattaaatgcttcatatatggctgatggctatgctcgtactaaaaaagctgccgcatttcttacaacctttggagtaggtgaattgagtgcagttaatggattagcaggaagttacgccgaaaatttaccagtagtagaaatagtgggatcacctacatcaaaagttcaaaatgaaggaaaatttgttcatcatacgctggctgacggtgattttaaacactttatgaaaatgcacgaacctgttacagcagctcgaactttactgacagcagaaaatgcaaccgttgaaattgaccgagtactttctgcactattaaaagaaagaaaacctgtctatatcaacttaccagttgatgttgctgctgcaaaagcagagaaaccctcactccctttgaaaaaggaaaactcaacttcaaatacaagtgaccaagaaattttgaacaaaattcaagaaagcttgaaaaatgccaaaaaaccaatcgtgattacaggacatgaaataattagttttggcttagaaaaaacagtcactcaatttatttcaaagacaaaactacctattacgacattaaactttggtaaaagttcagttgatgaagccctcccttcatttttaggaatctataatggtacactctcagagcctaatcttaaagaattcgtggaatcagccgacttcatcttgatgcttggagttaaactcacagactcttcaacaggagccttcactcatcatttaaatgaaaataaaatgatttcactgaatatagatgaaggaaaaatatttaacgaaagaatccaaaattttgattttgaatccctcatctcctctctcttagacctaagcgaaatagaatacaaaggaaaatatatcgataaaaagcaagaagactttgttccatcaaatgcgcttttatcacaagaccgcctatggcaagcagttgaaaacctaactcaaagcaatgaaacaatcgttgctgaacaagggacatcattctttggcgcttcatcaattttcttaaaatcaaagagtcattttattggtcaacccttatggggatcaattggatatacattcccagcagcattaggaagccaaattgcagataaagaaagcagacaccttttatttattggtgatggttcacttcaacttacagtgcaagaattaggattagcaatcagagaaaaaattaatccaatttgctttattatcaataatgatggttatacagtcgaaagagaaattcatggaccaaatcaaagctacaatgatattccaatgtggaattactcaaaattaccagaatcgtttggagcaacagaagatcgagtagtctcaaaaatcgttagaactgaaaatgaatttgtgtctgtcatgaaagaagctcaagcagatccaaatagaatgtactggattgagttaattttggcaaaagaaggtgcaccaaaagtactgaaaaaaatgggcaaactatttgctgaacaaaataaatcataa

SEQ ID NO: 118 - protein, 548 aa, Lactococcus lactis
MYTVGDYLLDRLHELGIEEIFGVPGDYNLQFLDQIISHKDMKWVGNANELNASYMADGYARTKKAAAFLTTFGVGELSAVNGLAGSYAENLPVVEIVGSPTSKVQNEGKFVHHTLADGDFKHFMKMHEPVTAARTLLTAENATVEIDRVLSALLKERKPVYINLPVDVAAAKAEKPSLPLKKENSTSNTSDQEILNKIQESLKNAKKPIVITGHEIISFGLEKTVTQFISKTKLPITTLNFGKSSVDEALPSFLGIYNGTLSEPNLKEFVESADFILMLGVKLTDSSTGAFTHHLNENKMISLNIDEGKIFNERIQNFDFESLISSLLDLSEIEYKGKYIDKKQEDFVPSNALLSQDRLWQAVENLTQSNETIVAEQGTSFFGASSIFLKSKSHFIGQPLWGSIGYTFPAALGSQIADKESRHLLFIGDGSLQLTVQELGLAIREKINPICFIINNDGYTVEREIHGPNQSYNDIPMWNYSKLPESFGATEDRVVSKIVRTENEFVSVMKEAQADPNRMYWIELILAKEGAPKVLKKMGKLFAEQNKS

SEQ ID NO: 119 - DNA, 1647 bp, Artificial
  Lactococcus lactis  -ketoisovalerate decarboxylase KivD codon optimised gene
atgtatactgttggtgattacctgctggatcgtctgcatgaactgggcatcgaggaaattttcggcgtacctggtgactataacctgcagttcctggatcagatcatttcccacaaagatatgaaatgggttggtaacgcgaacgagctgaatgcaagctacatggctgacggttatgcacgcaccaagaaagctgcggcgttcctgactacttttggcgtcggcgagctgtctgcggtaaacggtctggccggctcctacgcggaaaacctgccggtagtagaaatcgtcggttccccgacctctaaagttcagaacgagggtaaattcgtgcaccatactctggccgatggtgacttcaaacacttcatgaagatgcacgaaccggtcactgctgctcgtacgctgctgaccgcggaaaatgcgactgtcgagattgatcgtgtactgagcgcactgctgaaagaacgcaagcctgtatacatcaacctgccggttgatgtcgcggccgccaaagcggaaaaaccatctctgccgctgaaaaaggagaacagcacctctaacaccagcgaccaggaaatcctgaacaagatccaggagtctctgaagaacgctaaaaagccgatcgtaatcaccggccatgagattatctctttcggtctggagaaaactgtcacccagttcatcagcaaaaccaaactgccgatcaccaccctgaacttcggtaaatcctccgttgacgaagcgctgccgtcctttctgggtatttacaacggcactctgtctgagccgaacctgaaagagttcgtggagtctgcggattttatcctgatgctgggcgtgaaactgacggattcctccaccggtgcattcacccaccacctgaatgagaataaaatgatctctctgaacattgatgagggcaaaatcttcaacgagcgtattcagaacttcgatttcgaatccctgatctcctccctgctggatctgtccgagattgaatataaaggcaaatacattgataagaagcaagaggacttcgtaccgtctaacgcgctgctgagccaggaccgtctgtggcaagctgtggaaaacctgacccagtccaacgaaaccatcgtggcggaacagggtacctccttcttcggtgctagctctatcttcctgaaatctaaaagccacttcatcggtcagccactgtggggctctattggctacaccttcccggcagcgctgggttcccaaatcgcagacaaagaatcccgccacctgctgttcattggtgacggctctctgcaactgaccgtacaggagctgggtctggcgattcgtgagaaaatcaacccgatttgtttcatcatcaacaacgatggctacactgttgagcgtgagatccacggcccgaaccagtcctacaacgacattccgatgtggaactactctaaactgccggaatccttcggtgcgactgaagaccgtgtcgtaagcaagatcgtccgtaccgaaaacgaattcgtgtctgtcatgaaagaagcacaggcggacccgaaccgcatgtactggatcgagctgattctggctaaagagggcgcgccaaaagtactgaaaaagatgggtaaactgttcgcagaacagaacaaatcctaa

SEQ ID NO: 120 - DNA, 3696 bp, Mycobacterium tuberculosis
  CDS (1)..(3696)
gtggccaacataagttcaccattcgggcaaaacgaatggctggtcgaagagatgtaccgcaagttccgcgacgacccctcctcggtcgatcccagctggcacgagttcctggttgactacagccccgaacccacctcccaaccagctgccgaaccaacccgggttacctcgccactcgttgccgagcgggccgctgcggccgccccgcaggcaccccccaagccggccgacaccgcggccgcgggcaacggcgtggtcgccgcactggccgccaaaactgccgttcccccgccagccgaaggtgacgaggtagcggtgctgcgcggcgccgccgcggccgtcgtcaagaacatgtccgcgtcgttggaggtgccgacggcgaccagcgtccgggcggtcccggccaagctactgatcgacaaccggatcgtcatcaacaaccagttgaagcggacccgcggcggcaagatctcgttcacgcatttgctgggctacgccctggtgcaggcggtgaagaaattcccgaacatgaaccggcactacaccgaagtcgacggcaagcccaccgcggtcacgccggcgcacaccaatctcggcctggcgatcgacctgcaaggcaaggacgggaagcgttccctggtggtggccggcatcaagcggtgcgagaccatgcgattcgcgcagttcgtcacggcctacgaagacatcgtacgccgggcccgcgacggcaagctgaccactgaagactttgccggcgtgacgatttcgctgaccaatcccggaaccatcggcaccgtgcattcggtgccgcggctgatgcccggccagggcgccatcatcggcgtgggcgccatggaataccccgccgagtttcaaggcgccagcgaggaacgcatcgccgagctgggcatcggcaaattgatcactttgacctccacctacgaccaccgcatcatccagggcgcggaatcgggcgacttcctgcgcaccatccacgagttgctgctctcggatggcttctgggacgaggtcttccgcgaactgagcatcccatatctgccggtgcgctggagcaccgacaaccccgactcgatcgtcgacaagaacgctcgcgtcatgaacttgatcgcggcctaccgcaaccgcggccatctgatggccgataccgacccgctgcggttggacaaagctcggttccgcagtcaccccgacctcgaagtgctgacccacggcctgacgctgtgggatctcgatcgggtgttcaaggtcgacggctttgccggtgcgcagtacaagaaactgcgcgacgtgctgggcttgctgcgcgatgcctactgccgccacatcggcgtggagtacgcccatatcctcgaccccgaacaaaaggagtggctcgaacaacgggtcgagaccaagcacgtcaaacccactgtggcccaacagaaatacatcctcagcaagctcaacgccgccgaggcctttgaaacgttcctacagaccaagtacgtcggccagaagcggttctcgctggaaggcgccgaaagcgtgatcccgatgatggacgcggcgatcgaccagtgcgctgagcacggcctcgacgaggtggtcatcgggatgccgcaccggggccggctcaacgtgctggccaacatcgtcggcaagccgtactcgcagatcttcaccgagttcgagggcaacctgaatccgtcgcaggcgcacggctccggtgacgtcaagtaccacctgggcgccaccgggctgtacctgcagatgttcggcgacaacgacattcaggtgtcgctgaccgccaacccgtcgcatctggaggccgtcgacccggtgctggagggattggtgcgggccaagcaggatctgctcgaccacggaagcatcgacagcgacggccaacgggcgttctcggtggtgccgctgatgttgcatggcgatgccgcgttcgccggtcagggtgtggtcgccgagacgctgaacctggcgaatctgccgggctaccgcgtcggcggcaccatccacatcatcgtcaacaaccagatcggcttcaccaccgcgcccgagtattccaggtccagcgagtactgcaccgacgtcgcaaagatgatcggggcaccgatctttcacgtcaacggcgacgacccggaggcgtgtgtctgggtggcgcggttggcggtggacttccgacaacggttcaagaaggacgtcgtcatcgacatgctgtgctaccgccgccgcgggcacaacgagggtgacgacccgtcgatgaccaacccctacgtgtacgacgtcgtcgacaccaagcgcggggcccgcaaaagctacaccgaagccctgatcggacgtggcgacatctcgatgaaggaggccgaggacgcgctgcgcgactaccagggccagctggaacgggtgttcaacgaagtgcgcgagctggagaagcacggtgtgcagccgagcgagtcggtcgagtccgaccagatgattcccgcggggctggccactgcggtggacaagtcgctgctggcccggatcggcgatgcgttcctcgccttgccgaacggcttcaccgcgcacccgcgagtccaaccggtgctggagaagcgccgggagatggcctatgaaggcaagatcgactgggcctttggcgagctgctggcgctgggctcgctggtggccgaaggcaagctggtgcgcttgtcggggcaggacagccgccgcggcaccttctcccagcggcattcggttctcatcgaccgccacactggcgaggagttcacaccactgcagctgctggcgaccaactccgacggcagcccgaccggcggaaagttcctggtctacgactcgccactgtcggagtacgccgccgtcggcttcgagtacggctacactgtgggcaatccggacgccgtggtgctctgggaggcgcagttcggcgacttcgtcaacggcgcgcagtcgatcatcgacgagttcatcagctccggtgaggccaagtggggccaattgtccaacgtcgtgctgctgttaccgcacgggcacgaggggcagggacccgaccacacttctgcccggatcgaacgcttcttgcagttgtgggcggaaggttcgatgaccatcgcgatgccgtcgactccgtcgaactacttccacctgctacgccggcatgccctggacggcatccaacgcccgctgatcgtgttcacgcccaagtcgatgttgcgtcacaaggccgccgtcagcgaaatcaaggacttcaccgagatcaagttccgctcagtgctggaggaacccacctatgaggacggcatcggagaccgcaacaaggtcagccggatcctgctgaccagtggcaagctgtattacgagctggccgcccgcaaggccaaggacaaccgcaatgacctcgcgatcgtgcggcttgaacagctcgccccgctgcccaggcgtcgactgcgtgaaacgctggaccgctacgagaacgtcaaggagttcttctgggtccaagaggaaccggccaaccagggtgcgtggccgcgattcgggctcgaactacccgagctgctgcctgacaagttggccgggatcaagcgaatctcgcgccgggcgatgtcagccccgtcgtcaggctcgtcgaaggtgcacgccgtcgaacagcaggagatcctcgacgaggcgttcggctga

SEQ ID NO: 121 - protein, 1231 aa, Mycobacterium tuberculosis
VANISSPFGQNEWLVEEMYRKFRDDPSSVDPSWHEFLVDYSPEPTSQPAAEPTRVTSPLVAERAAAAAPQAPPKPADTAAAGNGVVAALAAKTAVPPPAEGDEVAVLRGAAAAVVKNMSASLEVPTATSVRAVPAKLLIDNRIVINNQLKRTRGGKISFTHLLGYALVQAVKKFPNMNRHYTEVDGKPTAVTPAHTNLGLAIDLQGKDGKRSLVVAGIKRCETMRFAQFVTAYEDIVRRARDGKLTTEDFAGVTISLTNPGTIGTVHSVPRLMPGQGAIIGVGAMEYPAEFQGASEERIAELGIGKLITLTSTYDHRIIQGAESGDFLRTIHELLLSDGFWDEVFRELSIPYLPVRWSTDNPDSIVDKNARVMNLIAAYRNRGHLMADTDPLRLDKARFRSHPDLEVLTHGLTLWDLDRVFKVDGFAGAQYKKLRDVLGLLRDAYCRHIGVEYAHILDPEQKEWLEQRVETKHVKPTVAQQKYILSKLNAAEAFETFLQTKYVGQKRFSLEGAESVIPMMDAAIDQCAEHGLDEVVIGMPHRGRLNVLANIVGKPYSQIFTEFEGNLNPSQAHGSGDVKYHLGATGLYLQMFGDNDIQVSLTANPSHLEAVDPVLEGLVRAKQDLLDHGSIDSDGQRAFSVVPLMLHGDAAFAGQGVVAETLNLANLPGYRVGGTIHIIVNNQIGFTTAPEYSRSSEYCTDVAKMIGAPIFHVNGDDPEACVWVARLAVDFRQRFKKDVVIDMLCYRRRGHNEGDDPSMTNPYVYDVVDTKRGARKSYTEALIGRGDISMKEAEDALRDYQGQLERVFNEVRELEKHGVQPSESVESDQMIPAGLATAVDKSLLARIGDAFLALPNGFTAHPRVQPVLEKRREMAYEGKIDWAFGELLALGSLVAEGKLVRLSGQDSRRGTFSQRHSVLIDRHTGEEFTPLQLLATNSDGSPTGGKFLVYDSPLSEYAAVGFEYGYTVGNPDAVVLWEAQFGDFVNGAQSIIDEFISSGEAKWGQLSNVVLLLPHGHEGQGPDHTSARIERFLQLWAEGSMTIAMPSTPSNYFHLLRRHALDGIQRPLIVFTPKSMLRHKAAVSEIKDFTEIKFRSVLEEPTYEDGIGDRNKVSRILLTSGKLYYELAARKAKDNRNDLAIVRLEQLAPLPRRRLRETLDRYENVKEFFWVQEEPANQGAWPRFGLELPELLPDKLAGIKRISRRAMSAPSSGSSKVHAVEQQEILDEAFG

SEQ ID NO: 122 - DNA, 3696 bp, Artificial
  Mycobacterium tuberculosis  -ketoglutarate decarboxylase Kgd codon optimised gene
atggctaatatctcctctccgtttggtcagaatgaatggctggtagaagaaatgtaccgtaaattccgcgatgacccgtcctctgtggacccgtcctggcatgaattcctggtagactacagcccggagccgaccagccaaccggcagcggaaccaacccgcgttacttctccgctggtagcggaacgtgcagctgctgccgcgcctcaggcgccgcctaaaccggcggatactgccgcagccggtaacggtgtggtggccgcactggctgctaagactgcggttccgccgccagcagaaggcgatgaagttgcagtcctgcgcggtgcggcggctgcagtggtgaaaaacatgagcgcgtccctggaggtaccgaccgccacgagcgtgcgcgcggtccctgctaaactgctgattgataaccgtattgtgatcaacaaccagctgaaacgtacccgtggtggcaagatctccttcactcatctgctgggttatgcactggtacaagcggttaagaaattccctaacatgaaccgtcattacactgaggtcgacggtaaaccgacggctgttactccggcacacacgaacctgggcctggcgatcgacctgcaaggtaaagatggtaagcgctccctggtagttgcgggtattaaacgttgcgaaaccatgcgtttcgcacaattcgtaaccgcctacgaggacattgtccgccgtgctcgtgatggcaaactgaccaccgaagattttgcgggcgttactattagcctgaccaacccaggcaccatcggcaccgtgcacagcgtacctcgtctgatgccgggccaaggtgcgattatcggtgtgggtgccatggagtacccggcagaatttcagggtgcttctgaagagcgcatcgccgagctgggtattggtaaactgatcaccctgacttctacctatgaccaccgcatcattcagggcgcagaatccggtgacttcctgcgcactattcacgaactgctgctgtccgacggtttctgggatgaagtttttcgtgaactgagcatcccatatctgccagttcgctggtccaccgacaatccggactctatcgttgacaaaaacgctcgcgtaatgaacctgatcgctgcttatcgtaatcgtggtcacctgatggctgatacggatccgctgcgcctggataaagctcgtttccgttcccacccggacctggaagtgctgacccatggtctgactctgtgggatctggaccgcgtgttcaaagtagatggtttcgcgggtgctcagtacaagaagctgcgtgacgtgctgggtctgctgcgtgatgcgtactgtcgtcacattggtgtggagtacgcccacattctggatccggaacagaaagaatggctggagcagcgtgtcgagaccaaacacgtaaaaccgaccgtagcgcagcagaaatatatcctgtccaaactgaacgccgccgaggctttcgaaactttcctgcagaccaagtacgtgggccagaaacgcttcagcctggagggtgcggaaagcgttattccgatgatggatgcagctatcgatcagtgcgcggaacatggtctggatgaagtcgttatcggtatgccgcaccgtggtcgcctgaacgtactggcaaacatcgtcggtaaaccatattctcagatcttcacggaattcgagggcaacctgaacccgtcccaagcccacggctccggcgacgtaaaatatcatctgggtgctaccggcctgtatctgcagatgttcggtgataacgacatccaggtatctctgactgctaacccgagccacctggaggcggttgatcctgttctggaaggtctggttcgcgccaaacaggatctgctggaccacggctctatcgacagcgatggccagcgtgcattcagcgttgtaccgctgatgctgcatggcgacgcggcgttcgccggtcagggtgtcgtagcagaaactctgaacctggcgaacctgcctggctatcgcgtgggtggcaccattcacatcatcgttaacaaccaaatcggtttcaccacggcaccggagtatagccgttctagcgaatattgcaccgacgtagccaaaatgatcggtgcgccgatcttccatgtaaacggtgacgatccagaggcctgcgtgtgggtggctcgtctggccgtagacttccgccagcgttttaagaaagatgtggttatcgacatgctgtgctaccgccgtcgtggtcacaacgaaggtgatgatccgtctatgactaacccgtatgtctatgacgtggtggacaccaagcgtggtgcacgcaaatcttacacggaggccctgatcggtcgtggcgacatctctatgaaagaagcggaagacgctctgcgtgattaccagggtcagctggaacgtgtgttcaatgaggtgcgtgagctggaaaagcacggcgtacaaccgtccgaatccgtagagtccgatcagatgatccctgctggtctggcaactgctgttgataaaagcctgctggcgcgtatcggcgacgcattcctggcgctgccgaatggctttaccgcgcacccgcgcgtacagccggtactggaaaaacgtcgtgaaatggcctacgaaggtaaaatcgattgggccttcggtgagctgctggccctgggctctctggtggctgagggcaagctggtacgcctgagcggccaggactcccgtcgcggcactttttctcagcgtcacagcgtcctgatcgatcgtcacaccggcgaagaattcacgccgctgcaactgctggctactaactccgatggtagcccgaccggtggtaagttcctggtgtacgattccccgctgtccgaatatgctgcagttggtttcgagtatggttacaccgttggcaacccggacgcagtggttctgtgggaagcgcagttcggcgatttcgttaacggtgcccagtccattatcgatgagtttattagcagcggcgaggccaaatggggccagctgtctaacgttgtgctgctgctgcctcacggccacgagggtcaaggcccggaccacacctccgcccgtatcgaacgcttcctgcagctgtgggctgaaggctctatgaccatcgcgatgccgtctaccccaagcaactacttccacctgctgcgtcgccacgcactggacggcattcagcgcccgctgatcgttttcaccccaaaatccatgctgcgccacaaagcagctgtttctgaaatcaaagattttacggaaattaaattccgttctgtgctggaagaaccaacctacgaagacggtattggcgaccgcaacaaggtaagccgtatcctgctgacctccggcaaactgtactacgagctggcagcacgtaaggcaaaagataaccgcaacgacctggccatcgtccgcctggaacagctggcgccactgccacgccgtcgcctgcgtgaaaccctggatcgctacgaaaacgtaaaagaattcttctgggtgcaggaagaaccggcaaaccagggtgcgtggccgcgctttggtctggaactgccggaactgctgccggataaactggcaggtatcaagcgcatcagccgtcgcgctatgagcgccccgtcttctggtagctctaaagtacacgctgtagaacagcaagagatcctggatgaggccttcggctaa

SEQ ID NO: 123 - DNA, 74 bp, Artificial sequence
  Forward primer for amplification of Bacillus subtilis aminotransferase x
ggggacaagtttgtacaaaaaagcaggctaggaggaattaaccatgaaggttttagtcaatggccggctgattg

SEQ ID NO: 124 - DNA, 62 bp, Artificial
  Reverse primer for amplification of Bacillus subtilis aminotransferase x
ggggaccactttgtacaagaaagctgggtttatgaaatgctagcagcctgttgaatgctttc

SEQ ID NO: 125 - DNA, 82 bp, Artificial
  Forward primer for amplification of Bacillus subtilis aminotransferase y
ggggacaagtttgtacaaaaaagcaggctaggaggaattaaccatgactcatgatttgatagaaaaaagtaaaaagcacctc

SEQ ID NO: 126 - DNA, 57 bp, Artificial
  Reverse primer for amplification of Bacillus subtilis aminotransferase y
ggggaccactttgtacaagaaagctgggttcaatcttcaaggctcgtaacctcgtgg

SEQ ID NO: 127 - DNA, 64 bp, Artificial
  Forward primer for amplification of Rhodobacter sphaeroides aminotransferase
ggggacaagtttgtacaaaaaagcaggctaggaggaattaaccatgcccggttgcgggggcttg

SEQ ID NO: 128 - DNA, 51 bp, Artificial
  Reverse primer for amplification of Rhodobacter sphaeroides aminotransferase
ggggaccactttgtacaagaaagctgggttcagacggcggccggttctttc

SEQ ID NO: 129 - DNA, 78 bp, Artificial
  Forward primer for amplification of Legionella pneumophila aminotransferase
ggggacaagtttgtacaaaaaagcaggctaggaggaattaaccatgagtatcgcatttgttaacggcaagtattgttg

SEQ ID NO: 130 - DNA, 67 bp, Artificial
  Reverse primer for amplification of Legionella pneumophila aminotransferase
ggggaccactttgtacaagaaagctgggtttagtttactagttgttggtaggaatcattaattatcc

SEQ ID NO: 131 - DNA, 76 bp, Artificial
  Forward primer for amplification of Nitrosomonas europaea aminotransferase
ggggacaagtttgtacaaaaaagcaggctaggaggaattaaccatgatttacctcaatggcaaatttctgccgatg

SEQ ID NO: 132 - DNA, 50 bp, Artificial
  Reverse primer for amplification of Nitrosomonas europaea aminotransferase
ggggaccactttgtacaagaaagctgggtttactggcgtggagcatgccc

SEQ ID NO: 133 - DNA, 79 bp, Artificial
  Forward primer for amplification of Neisseria gonorrhoeae aminotransferase
ggggacaagtttgtacaaaaaagcaggctaggaggaattaaccatgaggataaatatgaaccgtaacgaaattttattc

SEQ ID NO: 134 - DNA, 56 bp, Artificial
  Reverse primer for amplification of Neisseria gonorrhoeae aminotransferase
ggggaccactttgtacaagaaagctgggttcatgcagccatcgccttgaacacttc

SEQ ID NO: 135 - DNA, 66 bp, Artificial
  Forward primer for amplification of Pseudomonas aeruginosa aminotransferase
ggggacaagtttgtacaaaaaagcaggctaggaggaattaaccatgtcgatggccgatcgtgatgg

SEQ ID NO: 136 - DNA, 53 bp, Artificial
  Reverse primer for amplification of Pseudomonas aeruginosa aminotransferase
ggggaccactttgtacaagaaagctgggtttacttgaccagggtacgccactc

SEQ ID NO: 137 - DNA, 67 bp, Artificial
  Forward primer for amplification of Rhodopseudomonas palustris aminotransferase
ggggacaagtttgtacaaaaaagcaggctaggaggaattaaccatgaagctgataccgtgccgcgcc

SEQ ID NO: 138 - DNA, 51 bp, Artificial
  Reverse primer for amplification of Rhodopseudomonas palustris aminotransferase
ggggaccactttgtacaagaaagctgggttcaggcgaccgcgcggatcacc

SEQ ID NO: 139 - DNA, 71 bp, Artificial
  Forward primer for amplification of Bacillus subtilis aminotransferase (gi16077991)
ggggacaagtttgtacaaaaaagcaggctaggaggaattaaccatggagatgatggggatggaaaacattc

SEQ ID NO: 140 - DNA, 65 bp, Artificial
  Reverse primer for amplification of Bacillus subtilis aminotransferase (gi16077991)
ggggaccactttgtacaagaaagctgggtttatatcgtttgaaagctttctttcaccgttttcac

SEQ ID NO: 141 - DNA, 66 bp, Artificial
  Forward primer for amplification of Pseudomonas aeruginosa aminotransferase (gi9951072)
ggggacaagtttgtacaaaaaagcaggctaggaggaattaaccatgaacgcaagactgcacgccac

SEQ ID NO: 142 - DNA, 48 bp, Artificial
  Reverse primer for amplification of Pseudomonas aeruginosa aminotransferase (gi9951072)
ggggaccactttgtacaagaaagctgggtttaccggtgaccggcgcgg

SEQ ID NO: 143 - DNA, 69 bp, Artificial
  Forward primer for amplification of Pseudomonas aeruginosa aminotransferase (gi9951630)
ggggacaagtttgtacaaaaaagcaggctaggaggaattaaccatgacaatgaatgacgagccgcagtc

SEQ ID NO: 144 - DNA, 49 bp, Artificial
  Reverse primer for amplification of Pseudomonas aeruginosa aminotransferase (gi9951630)
ggggaccactttgtacaagaaagctgggttcagacgctggcgcggatgg

SEQ ID NO: 145 - DNA, 1221 bp, Methanococcus jannaschii
atgacaaaagtgctggtgatgtttatggatttcttatttgagaacagctggaaagcagtttgtccctacaatccaaagttggatttaaaggacatttatatttatgacacaaccctaagagatggagagcaaaccccaggagtttgctttaccaaagaacaaaaattggagattgcaaggaagttggatgaacttggattaaagcagattgaagctggcttcccaatagtatctgaaagagaagcagatatagttaaaacaattgctaatgaagggctaaatgctgatatcttagctttatgcagggctttaaagaaagatatagataaagcaatagagtgcgatgtagatgggattattaccttcatagcaacatctcctctccacttaaaatataaattcaacaacaaaagcttagatgaaatattagagatgggagttgaggcagttgagtatgcaaaggaacatggcttatttgttgctttctctgcagaggatgcgacaagaacaccaatagaggacttgattaaagtgcataaagccgctgaagaggctggagcagatagggttcatatagcagacacaactggctgtgctaccccccaaagtatggagtttatatgtaaaacattgaaggagaacttaaaaaaggcacatattggagtgcattgtcacaacgactttggatttgcagttataaattcaatatatggtttaattggaggagctaaggcagtttcaacaacagttaatggtattggagagagggcagggaatgcagctttagaagagctaattatggctttaactgtcttgtatgatgttgatttgggattaaacttggaggttcttccagagttatgcagaatggttgaggaatactctggaataaagatgccaaagaacaaaccaatagttggagagcttgtatttgctcatgaaagtggaattcacgttgatgctgtcatagagaatccattaacctatgaacccttccttccagagaaaatagggcttaagagaaatattttgttagggaagcattctggatgcagagccgttgcctataagctaaaacttatgggaattgattacgatagagagatgttgtgcgagattgttaaaaaggttaaagagattagagaggaaggtaaatttataactgatgaagtctttaaggagattgttgaagaagttttaaggaagagaaataaaaattaa

SEQ ID NO: 146 - DNA, 513 bp, Methanococcus jannaschii
atgattattaagggaagagctcacaaatttggggatgatgtagatacagacgcaataattccaggaccttacttaaggactacagacccttacgagttagcttcacactgcatggcagggatagatgaaaacttcccgaaaaaggttaaggagggggatgtgatagttgctggagagaattttggttgtggttcaagtagggagcaggctgtaatagcaataaaatactgtggtattaaggctgtgatagcaaaaagctttgcaagaatattctatagaaatgcaataaacgttggattaataccaataatagcaaatacagatgaaattaaagacggagacatagtagagattgatttagataaagaagagattgtaataaccaataaaaacaaaacaataaagtgtgaaacaccaaaaggtttagaaagagaaatattggctgctggtggcttagtcaattatttaaaaaagagaaaactaatacaatcaaaaaaaggtgtaaaaacatga

SEQ ID NO: 147 - DNA, 1263 bp, Methanococcus jannaschii
ttgacattggtagagaagatactatcaaaaaaagttggttatgaagtttgtgcaggagatagcatagaggttgaagttgatttggcaatgacacacgatggaacaacacctttagcatacaaagctttaaaggaaatgagtgatagtgtttggaatccagataaaatagtcgttgcctttgaccacaatgttccaccaaacacagttaaagctgctgaaatgcaaaaattagctttggagtttgttaaaagatttggcattaaaaatttccataaaggtggagaaggcatctgtcatcaaatcttagctgaaaattatgttttgccaaacatgtttgtagctggtggagacagccatacatgcacacatggagcttttggagcttttgctactggctttggagctactgatatggcttacatctatgcaacaggagaaacatggattaaagtgccaaaaacaattagggtagatatagttggaaaaaatgaaaatgtttctgccaaagatattgttttaagggtttgtaaggaaattgggagaagaggagcaacatacatggctattgagtatggtggagaggttgttaaaaacatggacatggatggaaggctaactttatgcaacatggcaatagagatgggaggaaaaacaggagtgatagaggctgatgaaattacttatgattatttaaagaaagagagaggactttctgatgaggatatagctaaattaaaaaaagagagaataacagtaaatagagatgaagcaaactactataaggagatagaaattgacataacagatatggaagaacaagttgctgttccacaccacccagataacgtaaagccaattagtgatgttgaagggactgagataaatcaagtttttattgggagttgcacaaatggaaggttgagtgatttaagagaagcagctaaatatttaaaaggtagggaggttcataaagatgttaagctaattgttatcccggcatcaaaaaaggtatttttgcaagcgttaaaagagggtattatagatatctttgttaaagctggggcgatgatttgcactccgggatgcggaccttgcttaggagctcatcaaggggttttggctgagggagaaatttgtttatcaacaacaaacagaaactttaaaggaaggatggggcatataaatagctatatttacttggcatctccaaagattgccgcaataagtgcagttaagggatatataaccaacaaattggattaa

SEQ ID NO: 148 - DNA, 1044 bp, Methanococcus jannaschii
atgatgaaggtgtgtgttatagaaggggatggaataggaaaagaagtgattccagaggccataaaaatattaaatgagttgggagagtttgaaataataaaaggagaggcaggattagaatgtttaaaaaaatatggtaatgcacttccagaggatacaatagaaaaagctaaagaggcagatattattttgtttggggctataacctcaccaaagccaggggaagttcaaaattataaaagccctataataacgttgaggaagatgtttcatttatatgcaaatgtaagaccaataaacaactttggaattggacaattaattgggaaaattgcagattatgaattcttaaatgctaagaatattgatatagttattataagagagaatacggaagatttatatgttggtagagagagattagaaaatgatacagcaatagctgagagggttataacaagaaagggtagcgagagaataataagatttgcatttgaatatgctataaaaaataataggaaaaaggtatcttgcatccataaagctaatgttttaagaataactgatggtttattcttagaggtttttaatgaaataaaaaaacattataatatagaggcagatgattatttagttgattcaacagctatgaacttaataaaacatcctgaaaaatttgatgttattgttacaacaaacatgtttggggatattttatcagatgaggcatctgcattaattggaggacttggtttagctccttcagcaaatataggagatgataaagcattatttgagccagttcatggttcagctccagatatagctgggaaaggtatagcaaatccaatggcatctatattaagtattgctatgctttttgattatattggagagaaagaaaagggagatttgattagagaggcagtgaaatactgcttaataaacaaaaaagttactcctgacttgggaggggatttaaagacaaaagatgttggagacgaaattctaaattacattagaaagaagttaaagggatattga

SEQ ID NO: 149 - DNA, 1155 bp, A. vinelandii
atggctagcgtgatcatcgacgacactaccctgcgtgacggtgaacagagtgccggggtcgccttcaatgccgacgagaagatcgctatcgcccgcgcgctcgccgaactgggcgtgccggagttggagatcggcattcccagcatgggcgaggaagagcgcgaggtgatgcacgccatcgccggtctcggcctgtcgtctcgcctgctggcctggtgccggctatgcgacgtcgatctcgcggcggcgcgctccaccggggtgaccatggtcgacctttcgctgccggtctccgacctgatgctgcaccacaagctcaatcgcgatcgcgactgggccttgcgcgaagtggccaggctggtcggcgaagcgcgcatggccgggctcgaggtgtgcctgggctgcgaggacgcctcgcgggcggatctggagttcgtcgtgcaggtgggcgaagtggcgcaggccgccggcgcccgtcggctgcgcttcgccgacaccgtcggggtcatggagcccttcggcatgctcgaccgcttccgtttcctcagccggcgcctggacatggagctggaagtgcacgcccacgatgatttcgggctggccacggccaacaccctggccgcggtgatgggcggggcgactcatatcaacaccacggtcaacgggctcggcgagcgtgccggcaacgccgcgctggaagagtgcgtgctggcgctcaagaacctccacggtatcgacaccggtatcgatacccgcggcatcccggccatctccgcgctggtcgagcgggcctcggggcgccaggtggcctggcagaagagcgtggtcggcgccggggtgttcactcacgaggccggtatccacgtcgacggactgctcaagcatcggcgcaactacgaggggctgaatcccgacgaactcggtcgcagccacagtctggtgctgggcaagcattccggggcgcacatggtgcgcaacacgtaccgcgatctgggtatcgagctggcggactggcagagccaagcgctgctcggccgcatccgtgccttctccaccaggaccaagcgcagcccgcagcctgccgagctgcaggatttctatcggcagttgtgcgagcaaggcaatcccgaactggccgcaggaggaatggcatga

SEQ ID NO: 150 - DNA, 30 bp, Artificial
  Avine-WT-R-BamHI
aaattggatcctcatgccattcctcctgcg

SEQ ID NO: 151 - DNA, 75 bp, Artificial
  Avine-WT-F-SacI
aaattgagctctttctccatacccgtttttttgggctaacaggaggaattaaccatggctagcgtgatcatcgac

SEQ ID NO: 152 - DNA, 31 bp, Artificial
  Avine-WT-R-HindIII
aaattaaagctttcatgccattcctcctgcg

SEQ ID NO: 153 - DNA, 76 bp, Artificial
  Avine-WT-F-HindIII
aaattaaagctttttctccatacccgtttttttgggctaacaggaggaattaaccatggctagcgtgatcatcgac

SEQ ID NO: 154 - DNA, 21 bp, Artificial
  AksA-Avine-F
atggctagcgtgatcatcgac

SEQ ID NO: 155 - DNA, 32 bp, Artificial
  AksA-Avine-R1
aaattggcgcgcctcatgccattcctcctgcg

SEQ ID NO: 156 - DNA, 32 bp, Artificial
  Pgal2-F2
aaattgttaactccagaaggcacatctattac

SEQ ID NO: 157 - DNA, 49 bp, Artificial
  Pgal2-R
cgtcgatgatcacgctagccattatgaaagcctccttttttttattatg

SEQ ID NO: 158 - DNA, 207 bp, Artificial
  mtSP
atggcctccactcgtgtcctcgcctctcgcctggcctcccagatggctgcttccgccaaggttgcccgccctgctgtccgcgttgctcaggtcagcaagcgcaccatccagactggctcccccctccagaccctcaagcgcacccagatgacctccatcgtcaacgccaccacccgccaggctttccagaagcgcgcctactcttcc

SEQ ID NO: 159 - DNA, 29 bp, Artificial
  pF113-F-NsiI
aaattatgcatacagcatggcctgcaacg

SEQ ID NO: 160 - DNA, 31 bp, Artificial
  pF113-R-AgeI
aaattaccggtcagggttattgtctcatgag

SEQ ID NO: 161 - DNA, 32 bp, Artificial
  AT-Vfl_for_Ec
aaatttggtaccgctaggaggaattaaccatg

SEQ ID NO: 162 - DNA, 33 bp, Artificial
  Kdc_for_Ec
aaatttactagtggctaggaggaattacatatg

SEQ ID NO: 163 - DNA, 35 bp, Artificial
  Kdc_rev_Ec
aaatttaagcttattacttgttctgctccgcaaac

SEQ ID NO: 164 - DNA, 57 bp, Artificial
  AT-Vfl-F
aaatttactagtaagaatttttgaggaggcaatataaatgaataaaccacagtcttg

SEQ ID NO: 165 - DNA, 32 bp, Artificial
  AT-Vfl-R
aaatttggatcctacaagaaagctgggtttac

SEQ ID NO: 166 - DNA, 33 bp, Artificial
  AT-Vfl_rev_Ec
aaatttactagtaagctgggtttacgcgacttc

SEQ ID NO: 167 - DNA, 1221 bp, Escherichia coli
atgaccaaagttctggtaatgttcatggacttcctgttcgaaaactcctggaaagcggtttgcccgtacaacccgaaactggatctgaaagacatctacatctacgacaccactctgcgtgacggtgaacagactccgggcgtttgcttcaccaaagagcagaagctggaaatcgctcgtaagctggacgaactgggtctgaagcagatcgaagctggcttcccgatcgtttctgaacgtgaagctgacatcgttaaaactatcgctaacgaaggtctgaacgctgacatcctggcactgtgccgtgcgctgaagaaagacatcgacaaagcaatcgaatgcgacgttgacggtatcatcactttcatcgcaacttctccgctgcacctgaaatacaaattcaacaacaaatctctggatgaaatcctggaaatgggcgttgaagcggtagaatacgctaaagagcacggtctgttcgttgcattctctgcagaagatgcaactcgtactccgatcgaagatctgatcaaagttcacaaagcagctgaagaagcgggtgctgaccgcgttcacatcgctgacaccactggctgcgcaactccgcagtctatggaattcatctgcaaaactctgaaagaaaacctgaagaaagcacacatcggcgtacactgccacaacgacttcggtttcgctgttatcaactccatctacggtctgatcggtggtgcgaaagcggtatctactaccgttaacggtatcggtgaacgtgctggtaacgctgcactggaagagctgatcatggcgctgaccgtactgtacgacgttgacctgggtctgaacctggaagttctgccggaactgtgccgtatggttgaagaatactccggtatcaagatgccgaaaaacaagccaatcgttggtgaactggtattcgctcacgaatccggtatccacgttgacgctgttatcgaaaacccgctgacttacgaaccgttcctgccggaaaaaatcggtctgaaacgtaacatcctgctgggtaagcactctggttgccgtgctgttgcttacaagctgaaactgatgggtatcgactacgaccgtgaaatgctgtgcgaaatcgttaagaaagttaaagaaatccgtgaagaaggtaaattcatcactgacgaagttttcaaagagatcgttgaagaagttctgcgtaagcgtaacaaaaactaa

SEQ ID NO: 168 - DNA, 1044 bp, Escherichia coli
atgatgaaagtttgcgttatcgaaggtgacggtatcggtaaagaagttatcccggaagctatcaagatcctgaacgaactgggtgaattcgaaatcatcaaaggtgaagcgggtctggaatgcctgaagaaatacggtaacgcactgccagaagataccatcgaaaaagcgaaagaagctgacatcatcctgttcggtgcaatcacttctccgaagccgggtgaagttcagaactacaaatctccgatcatcactctgcgtaagatgttccacctgtacgctaacgtacgtccgatcaacaacttcggtatcggtcagctgatcggtaagatcgctgactacgagttcctgaacgctaaaaacatcgacatcgttatcatccgtgaaaacactgaagatctgtacgttggtcgtgaacgtctggaaaacgacactgctatcgctgagcgcgttatcactcgtaaaggttctgaacgtatcatccgcttcgcattcgaatacgcaatcaaaaacaaccgtaagaaagtttcctgcatccacaaagctaacgtactgcgtatcactgacggtctgttcctggaagtattcaacgaaatcaagaaacactacaacatcgaagctgacgactacctggttgactccactgcaatgaacctgatcaagcacccggaaaaattcgacgttatcgttaccactaacatgttcggtgacatcctgtctgacgaagcgtctgcactgatcggtggtctgggtctggcaccgtctgctaacatcggtgacgacaaagcgctgttcgaaccggttcacggttctgcaccggatatcgctggtaaaggtatcgctaacccgatggcttctatcctgtctatcgcgatgctgttcgactacatcggtgaaaaagagaaaggcgacctgatccgtgaagcggtaaaatactgcctgatcaacaagaaagttactccggatctgggtggtgacctgaaaaccaaagacgttggtgacgaaatcctgaactacatccgtaagaaactgaaaggttactaa

SEQ ID NO: 169 - DNA, 1263 bp, Escherichia coli
atgactctggttgagaagatcctctccaagaaagttggttacgaagtttgcgcaggcgactccatcgaagttgaagttgacctggcgatgactcacgacggtactactccgctggcttacaaagcgctgaaagagatgtctgactccgtatggaacccggacaagatcgttgttgcattcgaccacaacgtaccgccgaacaccgttaaagcagctgaaatgcagaagctggcgctggaattcgttaagcgcttcggtatcaaaaacttccacaaaggtggtgaaggtatctgccaccagatcctggctgaaaactacgttctgccgaacatgttcgttgctggcggcgactctcacacctgtactcacggtgcattcggtgcattcgcaactggcttcggtgcaactgacatggcttacatctacgcaactggcgaaacctggatcaaagttccgaaaactatccgcgttgatatcgttggtaaaaacgaaaacgtatctgcgaaagacatcgttctgcgcgtttgcaaagaaatcggtcgtcgcggtgcaacttacatggctatcgaatacggtggtgaagttgttaaaaacatggacatggacggtcgtctgactctgtgcaacatggctatcgaaatgggtggtaaaactggcgttatcgaagctgacgaaatcacttacgactacctgaagaaagagcgtggtctgtctgacgaagatatcgctaaactgaagaaagagcgtatcaccgttaaccgtgacgaagctaactactacaaagaaatcgaaatcgacatcactgacatggaagaacaggttgctgtaccgcaccacccggataacgttaagccaatctctgacgttgaaggtactgaaatcaaccaggtattcatcggttcctgcaccaacggtcgtctgtctgatctgcgtgaagctgcgaaatacctgaaaggtcgtgaagttcacaaagacgttaagctgatcgttatcccggcttccaagaaagtattcctgcaggcgctgaaagaaggtatcatcgacatcttcgttaaagcgggtgcgatgatctgtactccgggttgcggtccgtgcctgggtgcacaccagggcgtactggcagaaggtgaaatctgcctgtctactaccaaccgtaacttcaaaggtcgtatgggtcacatcaactcttacatctacctggcttctccgaaaatcgctgctatctctgctgttaaaggttacatcactaacaagctggattaa

SEQ ID NO: 170 - DNA, 513 bp, Escherichia coli
atgatcatcaaaggtcgtgcgcacaagttcggtgacgacgttgacactgacgctatcatcccaggtccgtacctccgtactactgacccgtacgaactggcatctcactgcatggcgggtatcgacgaaaacttcccgaagaaagttaaagaaggtgacgttatcgttgctggcgaaaacttcggttgcggttcttcccgtgagcaggctgttatcgctatcaaatactgcggtatcaaagcggttatcgctaaatctttcgcacgtatcttctaccgtaacgcaatcaacgtaggtctgatcccgatcatcgctaacaccgacgaaatcaaagacggtgacatcgttgaaatcgacctggataaagaagaaatcgttatcactaacaaaaacaaaactatcaagtgcgaaactccgaaaggtctggaacgtgaaatcctggcagctggcggtctggttaactacctgaagaaacgtaagctgattcagtccaagaaaggcgtaaaaacttaa

SEQ ID NO: 171 - DNA, 1221 bp, Saccharomyces cerevisiae
atgaccaaggttttggtcatgttcatggacttcttgtttgaaaactcctggaaggccgtttgtccatacaacccaaagttggacttgaaggacatctacatctacgacaccactttaagagatggtgaacaaaccccaggtgtttgtttcaccaaggaacaaaaattggaaattgccagaaagttggacgaattgggtttgaaacaaatcgaagctggtttcccaatcgtttctgaaagagaagctgacattgtcaagaccattgccaacgaaggtttgaacgctgatatcttagctctatgtagagctttgaagaaggacattgacaaggccatcgaatgtgatgtcgatggtatcatcactttcattgctacttctccattacatttgaaatacaagttcaacaacaaatctttggacgaaatcttggaaatgggtgttgaagctgtcgaatacgccaaggaacacggtttattcgttgctttctctgctgaagatgctaccagaactccaattgaagatttgatcaaggtccacaaggctgctgaagaagctggtgctgaccgtgtccacattgctgacaccactggttgtgccactccacaatccatggaatttatctgtaagactttgaaggaaaacttgaagaaggctcacattggtgttcactgtcacaacgatttcggtttcgctgtcatcaactccatctacggtttgattggtggtgccaaggccgtttccaccaccgtcaacggtatcggtgaaagagctggtaacgctgctttggaagaattgatcatggctttgactgtcttatacgatgtcgatttgggtttgaacttggaagttttgccagaattgtgtagaatggttgaagaatactctggtatcaagatgccaaagaacaagccaattgtcggtgaattggttttcgctcatgaatctggtattcacgttgacgctgtcattgaaaacccattgacctacgaacctttcttgccagaaaagatcggtttgaagagaaacatcctattaggtaagcactctggttgtcgtgctgttgcttacaaattgaaattgatgggtattgactacgacagagaaatgttgtgtgaaattgtcaagaaggtcaaggaaatcagagaagaaggtaagttcatcactgacgaagttttcaaggaaatcgttgaagaagttttgagaaagagaaacaaaaattaa

SEQ ID NO: 172 - DNA, 1263 bp, Saccharomyces cerevisiae
atgactttagtcgaaaagatcttatccaagaaggtcggttacgaagtttgtgccggtgactctattgaagttgaagttgacttggccatgacccacgacggtactaccccattggcttacaaggctttgaaggaaatgtctgactccgtctggaacccagacaagattgttgttgctttcgaccacaacgttccaccaaacaccgtcaaggctgctgaaatgcaaaaattggctttggaatttgtcaagagattcggtatcaagaacttccacaagggtggtgaaggtatctgtcaccaaatcttggctgaaaactacgttttgccaaacatgttcgttgctggtggtgactcccacacttgtacccacggtgctttcggtgcctttgctaccggtttcggtgctactgacatggcttacatctacgctaccggtgaaacctggatcaaggttccaaagactatcagagttgacattgtcggtaagaacgaaaacgtttctgccaaggatatcgtcttgagagtttgtaaggaaattggtagaagaggtgctacttacatggccattgaatacggtggtgaagttgtcaagaacatggacatggacggtagattgactttgtgtaacatggccattgaaatgggtggtaagactggtgtcattgaagctgatgaaatcacctacgactacttgaagaaggaaagaggtctatccgatgaagatatcgccaaattgaagaaggaaagaatcactgttaacagagatgaagctaactactacaaggaaattgaaattgatatcactgacatggaagaacaagttgctgttcctcatcacccagacaatgtcaagccaatttctgacgtcgaaggtactgaaatcaaccaagttttcatcggttcttgtaccaacggtagattatctgatttacgtgaagctgctaagtacttgaaaggtcgtgaagttcacaaggatgtcaaattgattgtcattccagcttccaagaaggttttcttgcaagctttgaaggaaggtatcatcgatatcttcgtcaaggctggtgccatgatctgtaccccaggttgtggtccatgtttgggtgctcatcaaggtgtcttggctgaaggtgaaatctgtttgtccaccaccaacagaaacttcaagggtagaatgggtcacatcaactcttacatctacttggcttctccaaagattgctgccatttctgctgtcaagggttacatcactaacaaattggattaa

SEQ ID NO: 173 - DNA, 513 bp, Saccharomyces cerevisiae
atgatcatcaagggtcgtgctcacaagttcggtgacgatgttgacactgatgctatcattccaggtccatacttgagaaccactgacccatacgaattggcttctcactgtatggctggtattgacgaaaacttcccaaagaaggtcaaggaaggtgatgtcattgttgctggtgaaaactttggttgtggttcttccagagaacaagctgttattgccatcaaatactgtggtatcaaggctgtcattgccaagtctttcgctagaatcttctacagaaacgccatcaacgttggtttgattccaatcattgctaacactgacgaaatcaaggatggtgacattgttgaaatcgatttggacaaggaagaaattgttatcaccaacaagaacaagaccatcaagtgtgaaactccaaagggtttggaaagagaaatcttggctgctggtggtttagtcaactacttgaagaagagaaagttgatccaatccaagaagggtgtcaaaacctaa

SEQ ID NO: 174 - DNA, 1044 bp, Saccharomyces cerevisiae
atgatgaaggtttgtgtcattgaaggtgacggtattggtaaggaagtcattccagaagctatcaagatcttgaatgaattgggtgaatttgaaatcatcaagggtgaagctggtttggaatgtttgaagaaatacggtaacgctttgccagaagataccattgaaaaggccaaggaagctgatatcatcttattcggtgccatcacttctccaaagccaggtgaagttcaaaactacaaatctccaatcatcactttgagaaagatgttccacttgtacgctaacgtcagaccaatcaacaacttcggtattggtcaattgattggtaagattgctgactacgaatttttgaatgccaagaacattgacattgtcatcatcagagaaaacactgaagatttgtacgttggtcgtgaaagattagaaaacgacactgccattgctgaacgtgttatcaccagaaagggttctgaaagaatcatcagattcgctttcgaatacgccatcaagaacaacagaaagaaggtttcctgtatccacaaggctaacgttttgagaatcaccgatggtttattcttggaagttttcaacgaaatcaagaagcactacaacattgaagctgatgactacttggttgactccactgctatgaacttgatcaagcatccagaaaagttcgatgtcattgtcaccaccaacatgttcggtgacatcttatctgacgaagcttctgctttgattggtggtctaggtttggctccatctgccaacattggtgatgacaaggctttattcgaacctgttcacggttctgctccagacattgctggtaagggtattgccaacccaatggcttccatcttgtccattgctatgttgttcgactacatcggtgaaaaggaaaagggtgacttgatcagagaagctgtcaaatactgtttgatcaacaagaaggttactccagatttgggtggtgacttgaaaaccaaggatgtcggtgacgaaatcttgaactacatcagaaagaaattgaaaggctactaa

SEQ ID NO: 175 - DNA, 52 bp, Artificial
  DC-KdcA-F
aaatttggatccgttgaggaggcctcaaaaatgtatactgttggtgattatc

SEQ ID NO: 176 - DNA, 37 bp, Artificial
  DC-KdcA-R
aaatttggcgcgccattacttgttctgctccgcaaac

SEQ ID NO: 177 - DNA, 1161 bp, Artificial
  AksA gene codon pair optimised for E.coli
atggactggaaagcggtatctccgtacaacccgaaactgaacctgaaagactgctacctgtacgacaccactctgcgtgacggcgagcagactccgggcgtttgcttcactcacgaccagaaactggaaatcgcgaagaaactggacgaactgaaaatcaagcagatcgaagctggcttcccgatcgtttctgaaaacgaacgtaaagcaatcaagtctatcaccggtgaaggtctgaacgctcagatcctggcactctctcgcgtactgaaagaagatatcgacaaagcaatcgaatgcgacgttgacggtatcatcactttcatcgctgcttctccgatgcacctgaaatacaaactgcacaaatctctggatgaagttgaagagatgggtatgaaagcggtagaatacgctaaagaccacggtctgttcgttgcattctctgctgaagatgcaactcgtactccggttgaagatctgatccgtatccacaaaaacgctgaagagcacggtgctaaccgcgttcacatcgctgacactctgggttgcgcaactccgcaggcaatgtaccacatctgctctgaactgtcctccaacctgaagaaagcgcacatcggtgttcactgccacaacgacttcggtttcgctgttatcaactccatctacggtctgatcggtggtgcgaaagcggtatctactaccgttaacggtatcggtgaacgtgctggtaacgctgctatcgaagaaatcgttatggcgctgaaagttctgtacgaccacgacatgggtctgaacactgaaatcctgactgaaatctccaagctggttgaaaactactccaagatccgtatcccggaaaacaagccgctggttggtgaaatggcattctaccacgaatccggtatccacgttgacgctgttctggaaaacccgctgacttacgaaccgttcctgccagaaaaaatcggtcagaagcgtaagatcatcctgggtaagcactctggttgccgtgctgttgctcaccgtctgcaggaactgggtctggaagcatctcgtgaagagctgtgggaaatcgttaagaaaaccaaagaaactcgtgaagaaggtactgaaatctctgacgaagtattcaaaaacatcgttgacaaaatcattaaataa

SEQ ID NO: 178 - DNA, 1020 bp, Artificial
  AksF gene codon pair optimised for E.coli
atgcgtaacactccgaaaatctgcgttatcaacggtgacggtatcggtaacgaagttatcccggaaaccgttcgcgtactgaacgaaatcggtgacttcgaattcatcgaaactcacgctggttacgaatgcttcaagcgctgcggtgacgctatcccggaaaaaactatcgaaatcgctaaagagtctgactccatcctgttcggttctgtaactactccgaagccgactgaactgaaaaacaagccgtaccgttctccgattctgactctgcgtaaagagctggatctgtacgctaacatccgtccgactttcaacttcaaaaacctggacttcgttatcatccgtgaaaacactgaaggtctgtacgttaagaaagaatactacgacgaaaaaaacgaagttgcaactgctgaacgtatcatctccaaattcggttcttcccgtatcgttaagttcgcattcgactacgcactgcagaacaaccgtaagaaagtttcctgcatccacaaagctaacgttctgcgtatcactgacggtctgttcctgggcgtattcgaagaaatctccaagaaatacgagaagctgggtatcgtttctgacgactacctgatcgacgcaactgcgatgtacctgatccgtaacccgcagatgttcgacgtaatggttaccactaacctgttcggtgacatcctgtctgacgaagctgctggtctgatcggtggtctgggtatgtccccgtctgctaacatcggtgacaaaaacggtctgttcgaaccggttcacggttctgcaccggatatcgctggtaaaggtatctccaacccaatcgcgactatcctgtctgctgcaatgatgctggatcacctgaaaatcaacaaagaagctgaatacatccgtaacgctgttaagaaaaccgttgaatgtaaatacctgactccggacctgggtggtcacctgaaaacttctgaagttactgaaaaaatcatcgaatccatcaaatctcagatgattcagtaa

SEQ ID NO: 179 - DNA, 1257 bp, Artificial
  AksD gene codon pair optimised  for E. coli
atgactctggctgaaaaaatcatctccaaaaacgttggtaaaaacgtttacgctggcgactccgttgaaatcgacgttgacgttgcgatgactcacgacggtactactccgctgaccgttaaagcattcgagcagatctctgacaaagtatgggataacgaaaaaatcgttatcatcttcgaccacaacatcccggctaacacctctaaagctgctaacatgcaagttatcactcgtgaattcatcaagaagcagggtatcaaaaactactacctggacggtgaaggtatctgccaccaggttctgccggaaaaaggtcacgttaagccgaacatgatcatcgctggtgctgactctcacacctgtactcacggtgcattcggtgcattcgcaactggcttcggtgcaactgacatgggttacgtttacgcaactggtaaaacctggctgcgcgtaccagaaaccattcaggttaacgtaactggcgaaaacgaaaacatctccggtaaagacatcatcctgaaaacctgtaaagaagttggtcgtcgcggtgcaacttacctctctctggaatacggtggtaacgcggtacagaacctggatatggacgaacgtatggttctgtctaacatggctatcgaaatgggtggtaaagcgggtatcatcgaagctgacgacaccacttacaaatacctggaaaacgctggcgtttcccgtgaagaaatcctgaacctgaagaaaaacaagatcaaagttaacgaatctgaagaaaactactacaaaactttcgagttcgacatcactgacatggaagagcagatcgcttgcccgcaccacccggacaacgttaaaggcgtttctgaagtttctggtatcgaactggatcaggtattcatcggttcctgcaccaacggtcgtctgaacgatctgcgtatcgctgcgaagcacctgaaaggtaagaaagttaacgaatccactcgtctgatcgttatcccggcttccaagtctatcttcaaagaagcgctgaaagaaggtctgatcgacaccttcgttgactccggtgcgctgatctgtactccgggttgcggtccgtgcctgggtgcacaccagggcgtactgggtgacggtgaagtttgcctggcaactaccaaccgtaacttcaaaggtcgtatgggtaacaccaagtctgaagtttacctctcttctccggcaatcgctgcgaagtctgctgttaaaggttacatcactaacgagtaa

SEQ ID NO: 180 - DNA, 486 bp, Artificial
  AksE gene codon pair optimised  for E. coli
atgaagatcaccggtaaagttcacgtattcggtgacgacatcgacactgacgctatcattccgggtgcttacctgaaaaccactgacgaatacgaactggcttctcactgcatggcgggtatcgacgaagatttcccggaaatggttaaagaaggtgacttcctggttgctggcgaaaacttcggttgcggttcttcccgtgagcaggcaccgatcgctatcaaatactgcggtatcaaagcaatcatcgttgaatccttcgcacgtatcttctaccgtaactgcatcaacctgggcgtattcccgatcgaatgtaaaggtatctccaagcacgttaaagacggtgacctgatcgaactggatctggaaaacaagaaagttatcctgaaagacaaagttctggactgccacatcccgactggtactgcgaaagacatcatggacgaaggtggtctgatcaactacgctaagaagcagaaaaactaa

SEQ ID NO: 181 - DNA, 1161 bp, Artificial
  Methanococcus maripaludis
atggattggaaagctgtatctccgtacaaccctaaattaaatttgaaagactgttatttgtatgatacgacattgagagatggtgaacagactcccggagtttgttttacacatgatcaaaaacttgagatcgccaaaaaactggatgaacttaaaattaaacagatcgaagcgggttttccaattgtttctgaaaacgagagaaaagccatcaaatcaattactggcgaaggattaaatgcacaaattttggcgttatcaagagttttaaaagaggatattgataaagccattgaatgtgatgttgatggaataattacattcattgcagcttcaccaatgcatttgaaatacaaattgcacaaaagcctcgatgaagtcgaagaaatgggtatgaaagccgttgaatacgcaaaagatcacggacttttcgtagcattctctgcagaagatgcgacaagaactcctgttgaagacctcatcagaatccacaaaaatgcagaagaacacggtgccaatagggtgcatattgcagataccctcgggtgtgcaacaccacaggcaatgtatcatatctgctctgaattaagcagtaacttgaaaaaagcacatatcggggtacactgtcacaacgactttgggttcgcagttataaactcgatatacggattaattggtggagcaaaagcggtatctacaacagttaacggaataggcgaaagagcaggaaatgctgcaattgaagaaattgtaatggcattgaaagtactttacgaccacgatatgggattaaatactgaaatactaactgaaatatcgaaactcgttgaaaactattcaaaaattaggattcccgaaaataaacctcttgttggggaaatggcattttaccatgaaagcggaatacatgttgatgcggttttagagaatcctttaacgtatgaaccgtttttacctgaaaaaataggtcaaaaaagaaaaattatacttggaaaacattccggatgcagagcagttgcacacagactgcaagaacttgggcttgaagcttcaagagaagaactttgggaaattgtgaaaaaaactaaagaaaccagagaagaaggtactgaaataagcgacgaagtgtttaaaaacattgtcgataagattataaaataa

SEQ ID NO: 182 - DNA, 1020 bp, Artificial
  Methanococcus maripaludis
atgagaaacactcccaaaatttgtgttattaatggagatggcattggaaacgaagtgattcctgaaacagtgcgcgtcttgaatgaaattggggattttgaatttatagaaacacatgcgggctacgaatgttttaaaagatgtggcgatgcgatacctgaaaagaccatagaaattgcaaaagaatctgattctattctttttggatctgttactaccccaaaaccaactgaattaaaaaataaaccctatagaagtccaatattaactttaagaaaagaactcgacctttatgcaaatataagaccgactttcaacttcaaaaaccttgattttgtgataattcgcgaaaataccgaaggtctttatgtgaaaaaagaatattacgacgaaaaaaatgaagttgcgactgctgaacgaattatttctaaatttggaagctcgagaattgtaaaatttgcttttgattatgcacttcaaaacaatagaaaaaaagtatcctgtattcacaaagcaaatgttttgaggatcacagatgggttattcctaggggtatttgaagaaatatcgaaaaaatatgaaaaattgggaatagtgtctgatgactatttgattgatgcaacagcgatgtatttaattagaaatccgcaaatgtttgatgtcatggttacaacaaatttatttggagatattttatcggatgaagctgctggacttatcggaggacttggaatgtctccttcagcaaatattggtgacaaaaacggattattcgaaccagtgcatggatccgcaccagatattgctggaaaaggaatttcaaacccgattgcaacaattttaagtgctgcaatgatgcttgatcatttaaaaataaataaagaagcggaatacataagaaatgcagttaaaaaaactgttgaatgtaaatacctaactccggatcttgggggacacttaaaaacttctgaagttacagaaaaaatcattgaatcaataaaatctcaaatgattcaatga

SEQ ID NO: 183 - DNA, 1257 bp, Artificial
  Methanococcus maripaludis
atgacacttgctgaaaaaatcatttctaaaaatgttggaaaaaatgtttacgcgggcgatagcgttgaaatagacgtggatgtcgcaatgacgcatgacgggactacccctcttacagtaaaagcttttgagcagatttcagacaaagtttgggataatgaaaagatagttattatttttgaccacaacatccctgcaaacacgtcaaaagctgcgaatatgcaggttataacgagagaatttatcaaaaaacagggaattaaaaattattaccttgatggcgaaggaatatgtcatcaggtacttcctgaaaaaggccacgtgaagccaaacatgataattgcaggagctgacagtcacacctgtactcatggggcattcggtgcttttgcgacaggttttggtgcaactgacatgggttacgtctatgcaaccggaaaaacatggcttagagttcctgaaaccattcaagtaaatgtaaccggagaaaatgaaaatatttctggaaaggacattatcttaaaaacttgtaaggaagttggaagacgtggagcgacatacctgtctttagaatacggcggaaatgcagtccaaaatcttgacatggacgaaagaatggttttatcgaacatggccattgaaatgggcggaaaagctggaattatcgaagctgacgatactacttacaaataccttgaaaatgcaggagtttcaagagaagaaattcttaacttgaaaaaaaataaaataaaagttaatgaatccgaagaaaattactacaaaacatttgaatttgatataaccgatatggaagaacagattgcttgcccgcaccaccctgacaatgtaaaaggagtttctgaagtatcaggaattgaattagatcaggtattcatcggatcttgtacaaacggaagattaaacgatttaagaattgctgcaaaacatttgaaaggaaaaaaagttaatgaaagcacccgactaattgtaattcctgcatcaaaatcaatctttaaagaagcgttaaaagaaggattaatcgatacttttgtagattctggagcattaatctgcactcctggatgcggaccatgccttggagcccatcagggtgttttaggtgatggggaagtatgtcttgctacaaccaataggaactttaaaggaagaatgggaaacacaaaatcggaagtttacctctcatctcctgcaatagctgcaaaatccgcagttaaaggatacattaccaatgaataa

SEQ ID NO: 184 - DNA, 486 bp, Artificial
  Methanococcus maripaludis
atgaaaataacaggcaaggtgcacgtatttggggatgacatcgacacagatgcgataattcctggcgcttatttaaaaacaactgatgaatatgagcttgcatcacactgtatggctggaatcgatgaagattttccagaaatggtcaaagaaggcgactttttggtagcaggtgagaatttcggatgcggaagttcgagagagcaagctccaattgcaataaaatactgcggaatcaaggcaataattgttgaaagttttgcaaggatattttatagaaattgtattaatcttggagtttttccaattgaatgcaaaggaatatcaaaacacgtgaaagatggagatttaatagaattggatctcgaaaataaaaaagtaattttaaaggacaaggttctagactgccacattccaaccggaactgcaaaagacataatggatgaaggcgggcttataaattacgcaaagaaacagaaaaactaa

SEQ ID NO: 185 - DNA, 1251 bp, Methanobrevibacter smithii ATCC 35061
  CDS (1)..(1251)
atgaacatcaccgagaagatcctgtctgctaaagcgaagaaagaagttactccgggtgaaatcatcgaaatcccggttgatctggcgatgtctcacgacggtacttctccgccagcaatcaaaactttcgaaaaagttgcgactaaagtatgggacaacgagaagattgctatcgtattcgaccacaacgtaccggctaacaccatcggttctgctgaattccagaaagtttgccgcgatttcatcaagaagcagaagatcaccaaaaactacatccacggtgacggtatctgccaccaggtactgccggaaaaaggtctggttgaaccgggtaaagttatcgttggtgctgactctcacacttgcacttacggtgcttacggcgcattctctaccggtatgggtgcgactgacctggcgatggtttacgcaactggtaaaacctggttcatggttccggaagctatcaagatggaagtttctggtgaactgaactcttacactgcaccgaaagacatcatcctgaaaatcatcggtgaagttggtattgctggcgcaacttacaaaactgcagaattctgcggtgaaaccattgagaagatgggcgtagaaggtcgtgcgactatctgcaacatggctatcgaaatgggtgcgaaaaacggtatcatggaaccgaacaaagaagttatccagtacgtttctcagcgtactggtaagaaagagtctgaactgaacatcgttaagtctgacgaagatgctcagtactctgaagaaatgcacttcgacatcactgacatggaaccgcagatcgcttgcccgaacgacgttgataacgttaaagacatctccaaagttgaaggtactgcggttgatcagtgcctgatcggttcctgcaccaacggtcgtctgtctgacctgaaagacgcttacgaaatcctgaaagacaacgaaatcaacaacgacactcgcctgctgattctgccggcatctgcagaaatctacaagcaggctatccacgaaggttacatcgacgcattcatcgacgctggtgctatcatctgcaacccaggttgcggtccgtgcctgggtggtcacatgggcgtactgtctgaaggtgaaacttgcctgtctaccactaaccgtaacttcaaaggtcgtatgggcgacccgaaatcttccgtttacctggctaactccaaagttgttgctgcatctgcaatcgaaggtgttatcactaacccgaaagacctg

SEQ ID NO: 186 - protein, 417 aa, Methanobrevibacter smithii ATCC 35061; identical to SEQ ID NO: 21

SEQ ID NO: 187 - DNA, 1254 bp, Methanobrevibacter smithii ATCC 35061
  misc_feature (1)..(1254): Wild type
ttgaatattacagaaaaaatattatcagctaaagcaaaaaaagaggttacacccggagaaattattgaaattccggttgatttagctatgtctcatgacggaacatcaccaccagctataaaaacctttgaaaaagtagctaccaaagtctgggacaatgaaaaaattgcaattgtatttgaccataatgttcctgcaaatacaatcggatctgcagaattccagaaagtatgcagagacttcataaaaaaacagaaaattactaaaaattacatacatggtgacggaatatgccaccaggtacttcctgaaaaaggactggtagaacctggaaaagttattgtaggtgctgactcacacacatgtacttatggtgcatatggagcattttcaacaggaatgggtgctactgatttagctatggtttatgctacaggtaaaacatggtttatggttcctgaagctattaaaatggaagtcagcggagagttaaattcatacactgctccaaaagacatcattttaaaaatcatcggtgaagtgggaatagctggagctacctacaaaactgcagaattctgcggagaaaccatcgaaaaaatgggagtagaaggcagagctacaatatgtaacatggctattgaaatgggagctaaaaacggaataatggaaccgaataaagaagttatccaatatgtttcccaaagaaccggaaaaaaagaaagtgaattgaatattgttaaatccgatgaagatgcacagtattcagaagaaatgcactttgacataactgatatggaacctcaaatagcctgccctaatgatgtagacaatgttaaagacatctccaaagttgaaggcacagctgttgaccaatgcttaatcggttcttgtacaaacggcagattatctgatttgaaagatgcttatgaaatcttaaaagataatgaaattaataatgatactagattactaattcttccagcatcagctgaaatttacaaacaggcaatccatgaaggatacattgatgcatttatagatgcgggagctattatatgcaatccaggatgcggaccatgtcttggaggacatatgggagttttatctgaaggtgaaacctgcctatccacaacaaacaggaatttcaaaggaagaatgggggatccgaaatcctcagtatatctggctaattcaaaggttgttgctgcttcagctattgaaggagttattacaaatcctaaagatttatag

SEQ ID NO: 188 - DNA, 1254 bp, Methanococcus vannielii SB
  CDS (1)..(1254)
atgactctggctgaagctatcctgtccaagaaactgggtaaaaacgtttacgctaaagactccgttgaaatcgacgttgatctggcaatgactcacgacggtactactccgctgaccgttaaagcgttcgaagagatctctgaccgcgtattcgacaacaagaagatcgttatcgttttcgaccacaacatcccggctaacacctctaaagcggcaaacatgcagatcatcactcgcgacttcatcaagaagcacgacatcaaaaactactacctggatggtgaaggtatctgccaccagattctgccggaaaaaggtcacgttaagccgaacatggttatcgttggtgctgactctcacacttgcactcacggtgcgttcggtgcattcgcaactggcttcggtgcttctgacatgggttacgtttacgcaactggtaaaacctggttccgcgtaccggaaaccatccgcgttaacgtaactggtaaaaacgaaaacatctccggtaaagatatcgttctgaaaacttgcaaagaagttggtcgttctggtgcaacttacatggcgctggaatacggtggttctgctgttaaagcgctgaacatggacgaacgtatggtactgtgcaacatggctatcgaaatgggtggtaaagttggtctgattgaagctgaccacaccacttacgactacctgaaaaacgctggcgtatctaaccaggaaatcgctgaactgcagcgtaacaagatctccatcactgaaaacgaagaaacttacttcaaaaccgttgagttcgacatcactgacatggaagaacaggttgcttgcccgcaccacccggataacgttaaaggtatctctgaagttctgggtactccgatcgaccagattttcatcggttcctgcaccaacggtcacatcggcgatctgcgtatcgctgcgaagattctgaaaggtaagtctatcaacaaaaacacccgtctgatcgttatcccggcttctaaatctatcctgaagcaggcgctgaacgaaggtctgatcgacatcttcgttgacttcggtgcgctgatctgcgcaccaggttgcggtccgtgcctgggtgcacacgaaggcgtactgggtgacggtgaagtttgcctggcaactaccaaccgtaacttcaaaggtcgtatgggtaacatcaactctgaagtttacctgtcctctccggcaatcgctgctaaatctgctatcaaaggtcacatcactaacgag

SEQ ID NO: 189 - protein, 418 aa, Methanococcus vannielii SB; identical to SEQ ID NO: 22

SEQ ID NO: 190 - DNA, 1257 bp, Methanococcus vannielii SB
  misc_feature (1)..(1257): Wild type
atgacacttgctgaagcaattctttcaaaaaaacttggaaaaaatgtatatgctaaagatagcgttgaaatagacgtcgaccttgcaatgacccatgatggaactacgccattgactgtaaaagctttcgaagaaatttcagacagggtttttgataataaaaaaatagtaatagtttttgaccataatattccagcaaatacgtcaaaagcagcaaatatgcagattataacaagagacttcattaaaaaacacgacattaaaaactactatcttgatggagaaggaatatgtcatcaaatacttcctgaaaaaggccatgtaaagccaaacatggtaatcgttggtgcagatagccatacctgtacccatggggcatttggggcttttgcaacgggttttggtgcaagcgacatgggttacgtttatgctactggaaaaacatggtttagagttcctgaaacaatacgggtgaatgttactggtaaaaacgaaaatatttccggaaaggacattgttttaaaaacctgtaaagaagttggaagaagtggtgcaacatatatggcattggaatacggaggaagtgctgtaaaagccctaaacatggatgaaagaatggttttatgcaatatggcaattgaaatgggcggaaaagttggattaattgaagcagaccatacaacttacgattaccttaaaaatgcaggcgtttccaatcaagaaatagccgaattacaaagaaacaaaatttcaattactgaaaatgaagaaacatactttaaaactgttgaatttgatataactgacatggaagaacaagttgcatgcccacatcatcccgataatgtaaaaggtatttctgaggttttaggtactcctattgaccaaatatttatcggttcttgtacaaatgggcatataggcgaccttagaattgctgcaaaaattttaaaaggaaaatccataaataaaaatacaaggcttatagtaattcctgcatctaaatcgatacttaaacaggccctaaatgaaggattaattgatatttttgtggattttggtgcattaatctgtgctccaggatgcggcccttgccttggcgcacatgaaggggtacttggcgatggtgaagtatgtcttgcaactacaaaccgcaactttaaaggaagaatgggaaacattaattcagaggtatatttatcttctccagcaattgctgcaaaaagtgcaattaaagggcatattacaaacgaataa

SEQ ID NO: 191 - DNA, 1263 bp, Methanococcus aeolicus Nankai-3
  CDS (1)..(1263)
atgactctggctgaagaaatcctgtccaagaaagttggtaagaaagttaaagcgggtgacgttgttgaaatcgatatcgacctggcgatgactcacgacggtactactccgctgtctgcgaaagcattcaagcagatcactgacaaagtatgggataacaagaaaatcgttatcgttttcgaccacaacgttccggctaacaccctgaaagctgctaacatgcagaagatcactcgcgaattcatcaaagagcagaacatcatcaaccactacctggacggtgaaggtgtttgccaccaggtactgccggaaaacggtcacattcagccgaacatggttatcgctggcggcgattctcacacctgtacttacggcgcattcggtgcgttcgctactggcttcggtgcaactgacatgggtaacatctacgcaactggtaaaacctggctgaaagttccgaaaactattcgtatcaacgttaacggtgaaaacgacaagatcaccggtaaagacatcatcctgaaaatctgcaaagaagttggtcgttctggtgcaacttacatggcgctggaatacggtggtgaagcaatcaagaaactgtctatggacgaacgtatggttctgtctaacatggctatcgaaatgggtggtaaagttggtctgatcgaagctgacgaaaccacttacaactatctgcgtaacgttggtatttctgaagagaagatcctggaactgaagaaaaaccagatcactatcgacgaaaacaacatcgacaacgacaactactacaaaatcatcaacatcgacatcactgacatggaagaacaggttgcttgcccgcaccacccggataacgttaaaaacatctctgaagttaaaggcgcaccaatcaaccaggtattcatcggttcctgcaccaacggtcgcctgaacgatctgcgcattgcttctaaatacctgaaaggtaagaaagttcacaacgacgtacgtctgatcgttatcccggcttccaagtctatcttcaagcaggcgctgaaagaaggtctgatcgacatcttcgttgacgctggcgcgctgatctgcactccgggttgcggtccgtgcctgggtgcacaccagggcgtactgggtgacggtgaagtttgcctggcaactaccaaccgtaacttcaaaggtcgtatgggtaacaccactgctgaaatctacctgtcctctccggcaatcgctgctaaatctgctatcaaaggttacatcactaacgag

SEQ ID NO: 192 - protein, 421 aa, Methanococcus aeolicus Nankai-3; identical to SEQ ID NO: 23

SEQ ID NO: 193 - DNA, 1266 bp, Methanococcus aeolicus Nankai-3
  misc_feature (1)..(1266): Wild type
atgacattggcagaggaaatattatcaaaaaaagtaggaaaaaaagtaaaagcaggagatgttgtagaaatagatatagatttagcaatgactcatgatggaacaacaccattatctgcaaaggcatttaaacagataaccgataaggtatgggacaataaaaaaatagtcatagtatttgaccataatgtcccagcaaatacattaaaagccgcaaatatgcaaaaaattacacgagaatttataaaagaacaaaatataataaatcattatttggatggtgaaggcgtatgccatcaagtgctacctgaaaacggacatatacaaccaaacatggttatagctggtggagatagtcacacatgcacctatggggcatttggggcatttgcaacaggatttggggctaccgacatggggaatatatatgcaacaggaaaaacttggttaaaagttccaaaaaccataagaataaatgttaatggagaaaatgataaaattactggaaaagatattattttaaaaatttgtaaagaagttggacgaagtggagctacttacatggcacttgaatacggcggggaagcaataaaaaaattaagtatggacgaaagaatggttttaagcaatatggctatcgaaatgggcggaaaagttgggcttatcgaagccgatgaaaccacatataattaccttagaaatgtaggaattagtgaagaaaaaatattagaattgaaaaaaaatcaaataaccattgatgagaacaatatagataatgataattattataaaattataaatatagatattacagacatggaggagcaagtggcatgccctcaccatcccgataatgttaaaaatatttcggaagtaaaaggagctcccataaatcaggtgttcataggttcatgcacaaatggtaggttgaacgatttaagaatagcctcaaaatatttaaaaggaaaaaaggttcataatgatgttagattaatagtaatacctgcttcaaaatcaatatttaaacaggcattaaaagaaggattaattgatatttttgtagatgctggagctttaatttgcacccccggatgcggtccttgtttgggggcccaccaaggagttttaggagatggtgaagtttgtttagccaccacaaatagaaatttcaaaggaagaatgggaaatacgacagcggaaatatatttatcctcccccgctattgccgcaaaaagtgcaattaaaggatatatcacaaatgaataa

SEQ ID NO: 194 - DNA, 1254 bp, Methanococcus maripaludis S2
  CDS (1)..(1254)
atgactctggctgagaagatcatctccaaaaacgttggtaaaaacgtttacgcgaaagactccgttgaaatctccgttgacatcgcgatgactcacgacggtactactccgctgaccgttaaagcgttcgaacagatctctgacaaagtatgggataacgagaagatcgttatcatcttcgaccacaacatcccggctaacacctctaaagctgctaacatgcaagttatcactcgtgaattcatcaagaagcagggtatcaaaaactactacctggatggtgaaggtatctgccaccaggtactgccggaaaaaggtcacgttaagccgaacatgatcatcgctggcgcagactctcacacttgcactcacggtgcattcggtgcattcgctaccggtttcggtgcaactgacatgggttacgtttacgcaactggtaaaacctggctgcgcgtaccggaaaccattcgcgttaacgtaactggcgaaaacgaaaacatctccggtaaagacatcatcctgaaaacttgcaaagaagttggtcgtcgcggtgcaacttacatgtctctggaatacggtggtaacgctgttcacaacctgtctatggacgaacgtatggttctgtctaacatggctatcgaaatgggtggtaaagctggtatcatcgaagctgacgacaccacttaccgctacctggaaaacgctggcgtttcccgtgaagaaatcctggaactgaagaaaaacaagatcaccgttgacgaatctgaagaagattactacaaaactattgaattcgacatcaccggtatggaagaacaggttgcttgcccacaccacccggacaacgttaaaggcgtttctgaagttgaaggtactgaactgaaccaggtattcatcggttcctgcaccaacggtcgtctgaacgatctgcgtattgctgcgaaatacctgaaaggtaagaaagttaacgaaaacacccgtctgatcgttatcccggcatctaaatctatcttcaaagaagcgctgaacgaaggtctgatcgacatcttcgttgactccggtgcactgatctgcactccgggttgcggtccgtgcctgggtgcacaccagggcgttctgggtgacggtgaagtttgcctggcaaccactaaccgtaacttcaaaggtcgtatgggtaacaccaacgctcaggtttacctgtcctctccgaagatcgctgcgaagtctgcggtaaaaggttacatcactaatgag

SEQ ID NO: 195 - protein, 418 aa, Methanococcus maripaludis S2; identical to SEQ ID NO: 16

SEQ ID NO: 196 - DNA, 1257 bp, Methanococcus maripaludis S2
  misc_feature (1)..(1257): Wild type
atgacacttgctgagaaaatcatttcaaaaaatgttggaaaaaatgtttacgccaaagacagcgtcgaaataagcgtagatattgcaatgacacatgacgggaccaccccgcttacggtaaaagcctttgagcagatttcagataaagtatgggataatgaaaagatagtcattatttttgaccacaatatccctgcaaacacgtcaaaagctgcaaatatgcaggttataacgagagaattcataaaaaagcaggggattaaaaattactacctcgatggcgaaggaatatgccatcaagttctacctgaaaagggccatgtaaaaccaaacatgataattgcgggagctgacagccacacatgtactcatggggcctttggagcatttgctacaggttttggtgctacagacatgggttacgtctatgcaacaggaaaaacctggcttagagttcctgaaactatccgcgtaaatgtaactggagaaaatgaaaatatttctggaaaagacattattttaaaaacttgtaaggaagttggaagacgtggggctacgtacatgtctttagaatacggtggaaatgcagtccacaatctttcaatggatgaaagaatggttctgtcaaacatggctattgaaatgggcggaaaagcaggaattatcgaagctgatgatactacatatagatatcttgaaaatgcaggagtttcgcgcgaagaaattcttgaattgaaaaaaaataaaataacagttgatgaatccgaagaagactactacaaaacaattgaatttgacataaccggtatggaagaacaggttgcatgccctcaccaccctgataacgtaaaaggagtttcagaagttgaaggaacagaattaaaccaggtattcatcggttcatgcacaaacggaagattaaacgacttaagaattgctgcaaaatatttgaaaggaaaaaaagttaatgaaaacacaagattaattgtaatccctgcatcaaagtcaatatttaaagaagccctaaatgaaggattaattgatatctttgtagattccggagcattaatatgtacccctggatgcggaccatgtcttggagcccatcagggggttttaggtgatggagaagtatgccttgctacaactaaccggaactttaaaggaagaatgggaaacacgaacgcacaagtttacctctcttctccaaaaatagctgcaaaatctgcggttaaaggctacattacaaatgaataa

SEQ ID NO: 197 - DNA, 483 bp, Methanobrevibacter smithii ATCC 35061
  CDS (1)..(483)
atggacatcatcaaaggtaaaacctggactttcggtgaaaacatcgacactgacgttatcatcccaggtcgttacctccgcactttcaacccgcaggacctggcagaccacgtactggaaggtgaacgtccggacttcaccaagaacgttaagaaaggcgacatcatcgttgctgacgaaaacttcggttgcggttcttctcgcgaacaggcaccggttgctatcaaaactgctggcgttgatgctatcgttgcgaagtctttcgcacgtatcttctaccgtaacgctatcaacatcggtctgccggttatcgtttgcgacattcaggcgaaagacggtgacatcatcaacatcgacctgtctaaaggtattctgactaacgaaaccactggcgaatccgtaactttcgaaccgttcaaagagttcatgctggatatcctggaagataacggtctggttaaccactacctgaaagaaaaacag

SEQ ID NO: 198 - protein, 161 aa, Methanobrevibacter smithii ATCC 35061; identical to SEQ ID NO: 31

SEQ ID NO: 199 - DNA, 486 bp, Methanobrevibacter smithii ATCC 35061
  misc_feature (1)..(486): Wild type
atggatataattaaaggaaaaacatggacttttggtgaaaatattgatacggatgttattattcccggaagatatttgagaacctttaatcctcaagatttggctgatcatgtacttgaaggagaacgtccagattttacaaagaatgttaaaaaaggagacataatagtagctgatgaaaattttggttgcggttcatcaagagagcaggctccagtagctattaaaactgcaggtgtagatgctattgtggctaaatctttcgccagaattttttacagaaatgcaattaacattggattgccagtaattgtttgtgatattcaggcaaaagacggagatattataaacattgatttgtcaaaaggaatattaactaatgaaactactggtgaatcagttacttttgaaccttttaaagagtttatgttagatattttagaagataatggtcttgttaatcattatctaaaagaaaaacaataa

SEQ ID NO: 200 - DNA, 483 bp, Methanococcus vannielii SB
  CDS (1)..(483)
atgaagctgaaaggtaaagcgcacgtattctctgacgacgttgatactgacgcaatcattccgggtgcttatctgcgtactactgacgtttacgaactggcatctcactgcatggctggtatcgacgaaaacttcccgaagaaagttaacctgggtgacttcatcgttgctggcgaaaacttcggttgcggttcttcccgtgaacaggcaccgatctccatcaaatacctgggtatctccgcaatcatcgctgaatccttcgctcgcattttctaccgtaactccatcaacctgggtgttatcccgatcgaatgcaaaaacatctccaagcacgttaaaactggcgacctgatcgaactggatctggaaaacaagaaaatcatcctgaaagacatcgttctggaatgcaccgtaccgactggtaaagcgaaagagatcatcgacctgggtggtctgatcaactacgctaaagcgcagatgggt

SEQ ID NO: 201 - protein, 161 aa, Methanococcus vannielii SB; identical to SEQ ID NO: 32

SEQ ID NO: 202 - DNA, 486 bp, Methanococcus vannielii SB
  misc_feature (1)..(486): Wild type
atgaaattaaaaggcaaagcacacgtattttcagatgatgtcgataccgatgctataattccaggagcatatctaagaactactgatgtttatgaacttgcatcgcactgtatggcggggattgatgagaattttcctaaaaaagtaaatttgggggattttattgttgcaggtgaaaattttggctgtggaagttcaagggaacaggctccaatttcgataaaatatcttggaataagtgcaataattgcggaaagttttgcaagaattttttatcgaaattctataaacttaggtgtaattccaattgaatgcaaaaacatttcaaaacacgttaaaacaggggatttaatagaattagaccttgaaaacaaaaaaatcattttaaaagacattgttttagaatgcacggttccaactggaaaggcaaaagaaataattgatttaggcgggcttataaattatgcaaaagcgcaaatgggctaa

SEQ ID NO: 203 - DNA, 495 bp, Methanococcus aeolicus Nankai-3
  CDS (1)..(495)
atgatcatcaaaggtaacatccacctgttcggtgacgacatcgacactgacgctatcatcccaggtgcttacctgaaaaccactgacccgaaagagctggcatctcactgcatggcgggtatcgacgaaaaattctctaccaaagttaaagacggtgacatcatcgttgctggcgaaaacttcggttgcggttcttcccgtgaacaggcaccgatctccatcaagcacaccggtatcaaagcggttgttgctgaatccttcgctcgcattttctaccgtaactgcatcaacatcggtctgatcccgatcacctgtgaaggtatcaacgaacagattcagaacctgaaagacggtgacaccatcgaaatcgatctgcagaacgaaaccatcaagatcaactccatgatgctgaactgcggtgcaccgaaaggtatcgaaaaagaaatcctggatgctggcggtctggtacagtacaccaagaacaagctgaagaaa

SEQ ID NO: 204 - protein, 165 aa, Methanococcus aeolicus Nankai-3; identical to SEQ ID NO: 33

SEQ ID NO: 205 - DNA, 498 bp, Methanococcus aeolicus Nankai-3
  misc_feature (1)..(498): Wild type
atgataataaaaggaaatattcatttatttggtgatgatattgataccgatgccataattcccggggcctaccttaaaacaacagacccaaaggagttggcatctcattgcatggctggaattgatgaaaaattttcaacaaaggtaaaagacggcgatataattgttgcaggtgaaaattttggctgtggaagtagtagggaacaggcaccaatatccataaaacacaccggaataaaggcagtagttgctgaaagttttgcacggatattttatagaaattgtattaatataggattaatacctataacttgcgaaggaataaatgaacaaatccaaaacctaaaagatggcgacacaatagaaattgatttgcaaaatgaaacaataaaaataaattctatgatgttaaattgtggagctcccaaagggatagaaaaagaaattttagatgctggtggattagtacaatatacaaaaaataagttaaaaaaataa

SEQ ID NO: 206 - DNA, 483 bp, Methanococcus maripaludis S2
  CDS (1)..(483)
atgaagatcaccggtaaagttcacctgttcggtgacgacatcgacactgacgctatcattccgggtgcttacctgaaaaccactgacgaatacgaactggcttctcactgcatggcgggtatcgacgaaaacttcccggaacgcgttgaagatggcgacttcctggttgctggcgaaaacttcggttgcggttcttcccgtgaacaggcaccgattgctatcaaatactgcggtatcaaagcaatcatcgttgaatccttcgcacgtatcttctaccgtaactgcatcaacctgggcgtattcccgatcgaatgcaaaggtatctccaagcacgttaaagacggtgacgttatcgaactggatctggaagagaagaaagttatcctgaaagacaccgtactggactgcaacctcccgactggtactgcgaaagatatcatggacgaaggtggtctgatcaactacgctaagaagcagaaaaac

SEQ ID NO: 207 - protein, 161 aa, Methanococcus maripaludis S2; identical to SEQ ID NO: 26

SEQ ID NO: 208 - DNA, 486 bp, Methanococcus maripaludis S2
  misc_feature (1)..(486): Wild type
atgaaaataactggtaaggtgcacttatttggggatgacatcgatactgatgcgataattcccggagcttatttaaaaacgactgatgaatatgagcttgcatcgcactgtatggcaggaattgacgaaaattttccagaaagggtcgaagatggtgactttttagttgcaggtgaaaattttggatgcggaagttcaagggaacaggccccaattgccataaaatactgcggaatcaaggcaataattgttgagagttttgcaaggatattttacagaaattgcataaatttaggagtatttccaattgaatgcaagggaatatcaaaacacgtcaaagatggggatgtaatagaattagatcttgaagaaaaaaaagttatcttaaaagacacggttcttgactgcaatcttccgacagggactgcaaaagatataatggatgaaggcgggcttataaattacgcaaagaaacaaaaaaattaa

SEQ ID NO: 209 - DNA, 999 bp, Methanobrevibacter smithii ATCC 35061
  CDS (1)..(999)
atgtaccgcattgctatcattccgggcgacggtatcggtaaagaagtaatggaatccggtgaatatctgctggataaactggatctgaacttctctttcgaatacggtgaagcaggcttcgaatgctacaacaaaaacggcgttactctgccggaagaaaccatcaaaattgctaagaaatctgacgcaactctgttcggtgcttctacttctaccccaggtcagccgtccccgatcatcaacctgagaaaggaactggacgtttacgctaacctccgtccgatcaaatcttaccgtggtgttcgttctatctctgacaacatcgacttcctgatcgttcgtgaaaacactgaaggtctgtactctcagatcgaatacgagcaggacaacaaagttatcgctcagcgcgttatcactcgtcgtgcttctgagaagatcgctaaagttgcattcgaacagtgcatcgcgaagcagaagcagaaagttacttgcgtacacaaatctaacgttctgaagaaaactgacggcgtattcaaagagtctttctacaaaatcgctgaaaactacccgaacatcgaatccaacgacttctacgttgacgcaactgcgatgtacctgatcactcagccgcagaacttcgacgttatcgttacttctaacctgttcggtgacatcctgtctgacgaaggtgcgggtctggttggtggtctgggtctggcaccgtctggtaacatcggtgacgaccacggtctgttcgaaccggttcacggttctgcaccggatatcgctggtaaaggtatcgctaacccgtgctccatgatcctgactatcgcgatgatgctggactacctgaaagaatacgaaatctccaacaagatcaacaaagcggtagaaaacgttgtttctgctggtaaaactctgactccggacctgggtggtaactccaccacttctgaactgaccaagtctatcatcgacgaaatcctggaaggcgattac

SEQ ID NO: 210 - protein, 333 aa, Methanobrevibacter smithii ATCC 35061
MYRIAIIPGDGIGKEVMESGEYLLDKLDLNFSFEYGEAGFECYNKNGVTLPEETIKIAKKSDATLFGASTSTPGQPSPIINLRKELDVYANLRPIKSYRGVRSISDNIDFLIVRENTEGLYSQIEYEQDNKVIAQRVITRRASEKIAKVAFEQCIAKQKQKVTCVHKSNVLKKTDGVFKESFYKIAENYPNIESNDFYVDATAMYLITQPQNFDVIVTSNLFGDILSDEGAGLVGGLGLAPSGNIGDDHGLFEPVHGSAPDIAGKGIANPCSMILTIAMMLDYLKEYEISNKINKAVENVVSAGKTLTPDLGGNSTTSELTKSIIDEILEGDY

SEQ ID NO: 211 - DNA, 1002 bp, Methanobrevibacter smithii ATCC 35061
  misc_feature (1)..(1002): Wild type
atgtacagaattgcaataatacccggagatggaattggaaaggaagtaatggaatctggcgaatatttactggacaaacttgatttgaatttcagttttgaatatggggaagcaggttttgaatgttataacaaaaatggagttacattacctgaagaaaccattaaaatagctaaaaaatcagatgcaacattatttggagccagtacaagtacccccggccagccaagtccaattataaatcttagaaaagaacttgatgtttatgcaaatttaaggccgataaaatcctatagaggcgtcagatcaataagtgataatattgactttttaatagttcgtgaaaatactgagggactttacagccagattgaatatgaacaggacaataaagtaattgcccaaagagtcattacaagaagagccagtgaaaaaatagccaaagttgcttttgaacaatgtatcgccaaacaaaaacaaaaggtaacctgtgtacataaaagcaatgtcctaaaaaaaaccgacggagtctttaaagaaagtttttacaaaatagctgaaaattaccccaatattgaaagcaatgatttttatgttgatgcaacagcaatgtatcttattacacaaccgcaaaactttgatgtaattgtaaccagcaacctgtttggagatatactgtctgatgaaggtgccggtcttgtagggggacttggacttgccccttcaggaaatattggagatgatcatggattatttgaacctgttcacggatctgcaccagatattgcaggtaaaggtatagctaacccatgctccatgattttaacaatagctatgatgctggattacttaaaagaatatgaaataagtaataaaataaataaagctgttgaaaatgttgtaagtgcaggcaaaacactgactcctgatttaggaggaaacagcactacatcagaacttaccaaatctatcatagatgaaatacttgaaggtgactactaa

SEQ ID NO: 212 - DNA, 1008 bp, Methanobrevibacter smithii ATCC 35061
  CDS (1)..(1008)
atgtccacttctaacaagaaagacaacaaataccagatcgctgttattccgggtgacggtatcggtaaagaagtaatggaagcgactatctccgtactggatgaactggacgttgacttcgactacatctacggtatcgctggcgacgagtgcaacgaagagcacggtactccgctgccgcaggaaaccatcgacatcgttcgcgactctgacgcttgcctgttcggtgcagctggcgaaactgcagctgacgttatcgttaagatccgtcaggaaatgaagatgttcgctaatctgcgtccggtaaaatcttacccgaacaccaagtctctgttcgaaaacgttgacttcatgatcgttcgtgaaaacactgaaggtctgtacatcgctgaccaggaagaagaaactgaagatggcgcaatcgcgaagcgcgttatcactcgtgaagcagaagagcgtatcatcgactacgcattccagtacgctaaagacaacaaccgcactaaagttactgcagtacacaaagctaacgttctgaagaaaactgacggtctgttcaagaaaatcttctacgaagttggtgaaaaatacccggatatcgacactgaagatttctacgttgatgcaactgcgatgtacctggtaactcagccgcaggaattccaggttgttgttaccactaacctgttcggtgacatcctgtctgacgaaggtgctggtctggttggtggtctgggtctgattccgtctgctaacatcggtgctgacggtgcgctgttcgaaccggttcacggttctgcaccggatatcgctggtcagcagaaagcgaacccaatcgcgatgatgctgtctgcaatcatgatgctgcgttacctgggtgaaaacgacgcagctgacaaattcgacgctgctatcctgaaagttctgtctgaaggtaaaactctgactggcgacctgggtggttctgcaactaccatggaagttgctcaggcggttaaaaacgcgtta

SEQ ID NO: 213 - protein, 336 aa, Methanobrevibacter smithii ATCC 35061; identical to SEQ ID NO: 41

SEQ ID NO: 214 - DNA, 1011 bp, Methanobrevibacter smithii ATCC 35061
  misc_feature (1)..(1011): Wild type
ttgagtacctcaaacaaaaaagacaataaatatcagatagctgttattccaggtgatggaataggtaaagaagttatggaagcaacaatctctgttttagacgaattagatgttgattttgattatatttatggtatagcaggtgacgaatgcaatgaagaacatggaacacctcttcctcaggaaactatcgatattgtaagggattctgatgcatgtttatttggagctgccggagaaactgcagcagatgttattgtaaaaatccgtcaggaaatgaaaatgtttgctaatttaagacctgtcaaatcttatcctaacaccaaatcattatttgaaaatgttgactttatgattgtaagggaaaatacagaaggattatacattgcagaccaggaagaagaaaccgaagatggtgcaatagctaaacgtgttattacaagagaagctgaagaacgtattattgattatgcttttcaatatgcaaaggacaacaacagaactaaagttactgcagttcacaaagctaatgttcttaaaaaaaccgacggattatttaaaaaaatattctacgaagtcggcgaaaaatatccggatattgatactgaagacttttacgttgatgcaacagcaatgtatcttgtaacacagcctcaggaattccaggttgttgtaactaccaatttatttggagatattttatctgatgaaggtgcaggacttgttggcggacttggtttaattccatcagcaaatattggagcagatggtgctttatttgaacctgttcatggttcagcaccggatattgcaggtcagcaaaaagcaaatccaatagctatgatgctctcagcaattatgatgcttagataccttggtgaaaatgatgctgctgacaaatttgatgctgctattttaaaagtattaagtgaaggtaaaaccttaactggtgatttaggcggcagtgcaactaccatggaagtagcacaagctgttaaaaatgcattataa

SEQ ID NO: 215 - DNA, 1011 bp, Methanococcus vannielii SB
  CDS (1)..(1011)
atgggttacatgccgaaaatctgcgttatcactggcgacggtatcggtaaagaagttgttccggaaactctgcgcgtactgaacgaagttcacgacttcgaatacatcgaagcacacgcgggttacgagtgcttcaagcgctgcggtgaatccatcccggaatccactattcagactgcgaaaaactctgactccatcctgttcggttctgttaccactccgaaaccaactgaactgaaaaacaagccgtaccgctctccgattctgactctgcgtcaggaactggatctgtacgctaacatccgtccgacttacaacttcaaagacctggacttcgttatcatccgtgaaaacactgaatgcctgtacgttaagcgtgaatactacgacgaaatcaacgaagttgctatcgctgaacgtatcatctccaagaaaggttctgaacgtatcatcaaattcgctttcgaatacgcacgtctgaacaaccgtaagaaagtttcctgcatccacaaagctaacgtactgcgcgtaactgacggtctgttcctggaaatcttcgagaagatcgcgaaactgtacgaaaacttcggtatctcttctaacgactacctgatcgacgcaactgcaatgtacctgatcaaaaacccgtacatgttcgacgtaatggttaccactaacctgttcggtgacatcctgtctgacgaagctgctggtctgatcggtggtctgggtatgtctccgtctgctaacatcggtgacaacctgggtctgttcgaaccggttcacggttctgcaccggatatcgctggtaaaggtatctccaacccgatcgcgactatcctgtctgcgtctatgatgctggatcacctgaaaatgaacaagaaagcagaaatcatccgtaacgctgttaagaaaactatcaacaacggttacctgactccggacctgggtggttctctgaaaacttctgaagttgttaacaaagttatcgaattcatccgcgacgagatt

SEQ ID NO: 216 - protein, 337 aa, Methanococcus vannielii SB; identical to SEQ ID NO: 42

SEQ ID NO: 217 - DNA, 1014 bp, Methanococcus vannielii SB
  misc_feature (1)..(1014): Wild type
atgggctatatgccaaaaatctgtgtcataactggtgatggaattggaaaagaagtcgtgcctgaaacattaagagttttaaacgaagttcacgactttgaatatattgaagcccatgctgggtacgagtgttttaagagatgcggagaatcaatacctgaaagcacgattcaaacagctaaaaattctgattcaattctttttggttcagtaactactccaaaaccaactgaattaaaaaataagccatatcgtagtccaatacttacgttaaggcaggaattagacctttatgcaaacatacggcccacttataattttaaagacttggattttgtcataatacgggaaaatactgagtgtctttacgtaaaaagggagtattatgacgaaataaacgaagtagcaattgccgaaagaataatttcaaaaaagggaagcgaaagaataataaaatttgcatttgaatatgcaaggttaaataatcgaaaaaaagtgtcttgcatacacaaagcgaatgtattaagagtaactgacggattatttttggaaattttcgaaaaaatagctaaactttatgaaaactttggtatatcgagcaatgattacttaatagatgcaacagcaatgtaccttattaaaaatccatatatgtttgatgtaatggttacaacaaacctttttggagatattttatctgatgaggccgcaggacttattgggggtcttggaatgtcgccttctgcaaatattggggataatttaggattatttgagcctgttcatggttcagccccagatattgctggaaaaggaatatctaatccgattgcgacaattttaagtgcttcaatgatgcttgaccatttaaaaatgaataaaaaggcggaaattataagaaatgcagttaaaaaaacgataaataatggttatttgacacccgatcttggtggaagcctgaaaacttccgaagttgtaaataaagttatagaatttattcgggatgaaatctaa

SEQ ID NO: 218 - DNA, 1029 bp, Methanococcus aeolicus Nankai-3
  CDS (1)..(1029)
atgaagatcccgaaaatctgcgttatcgaaggtgacggtatcggtaaagaagttatcccagaaaccgttcgcattctgaaagaaatcggtgacttcgaattcatctacgaacacgctggttacgaatgcttcaagcgctgcggtgacgctatcccggagaaaactctgaaaactgcgaaagagtgcgacgctatcctgttcggtgcggtatctactccgaaactggacgaaactgaacgtaagccgtacaaatctccgattctgactctgcgtaaagaactggatctgtacgctaacgttcgtccgatccacaaactggataactctgactcctccaacaacatcgacttcatcatcatccgtgaaaacactgaaggtctgtactccggtgttgaatactacgacgaagaaaaagaactggcaatctctgaacgtcacatctccaagaaaggttccaagcgcatcatcaaattcgcattcgaatacgctgttaagcaccaccgtaagaaagtttcctgcatccacaagtctaacatcctgcgtatcactgacggtctgttcctgaacatcttcaacgaattcaaagaaaaatacaaaaacgaatacaacatcgaaggtaacgactacctggttgacgcaactgcgatgtacatcctgaaatctccgcagatgttcgacgttatcgttactaccaacctgttcggtgacattctgtctgacgaagcgtctggtctgctgggtggtctgggtctggcgccgtctgctaacatcggtgacaactacggtctgttcgaaccggttcacggttctgcaccggatatcgctggtaaaggcgttgctaacccgatcgctgcagtactgtctgcttctatgatgctgtactacctggatatgaaagagaagtctcgcctgctgaaagacgctgttaaacaggtactggcacacaaagacatcactccggacctgggtggtaacctgaaaaccaaagaagtttctgacaagatcatcgaagaactgcgtaagatctcg

SEQ ID NO: 219 - protein, 343 aa, Methanococcus aeolicus Nankai-3; identical to SEQ ID NO: 43

SEQ ID NO: 220 - DNA, 1032 bp, Methanococcus aeolicus Nankai-3
  misc_feature (1)..(1032): Wild type
ttgaaaatacctaaaatatgtgtgatagaaggggacggcataggaaaagaagtaatacctgaaacagtccgcatattaaaagaaataggggactttgaattcatatatgaacatgcgggatatgaatgttttaaacggtgcggtgatgcaatacccgaaaaaacattaaaaactgcaaaagaatgcgatgccatattatttggtgcagttagcacccctaaattagatgaaacggagcgaaaaccatataaaagccccatattaacacttagaaaagaattagacctatatgcaaatgtaagaccaatacataaattagataattccgatagttcaaataatatagatttcataataattcgagaaaacacagaaggactatattctggtgtggaatattatgacgaagaaaaagagttggcaatatcggaaaggcatatatctaaaaaaggaagcaaaagaattattaaatttgcatttgaatatgctgtgaaacatcacagaaaaaaagtatcctgtatccataaatcaaatattttaagaattacggacggtctttttttaaacatattcaatgaatttaaagaaaaatataaaaatgaatacaatatagaaggaaacgattatttagtagatgctacggcaatgtatattttaaaaagcccacaaatgttcgatgtaattgtaactacaaatttatttggtgacatattatccgatgaagcatcgggattattgggaggtttaggcttggctccttcagcaaatattggggataattatggattatttgagcctgtgcatggttccgccccagacatagctggaaaaggtgttgcaaatccgatagctgcggttcttagtgcttcgatgatgctatattacctagatatgaaggagaaaagtaggctattaaaagatgccgtaaaacaggtgttggcccataaagatataactcctgatttagggggcaatttaaaaacaaaggaagtaagcgataaaattattgaagaattacggaaaatatcctaa

SEQ ID NO: 221 - DNA, 1017 bp, Methanococcus maripaludis S2
  CDS (1)..(1017)
atgcgtaacactccgaaaatctgcgttatcaacggtgacggtatcggtaacgaagttgttccggaaaccgttcgcgtactgaacgaactgggtgacttcgaattcatccacgcgcacgctggttacgaatgcttcaagcgctgcggtgacgctatcccggaaaacaccatcgaaatcgctaaagagtctgactgcatcctgttcggttctgtaactactccgaaaccaactgaactgaaaaacaagtcttaccgctctccgattctgactctgcgtaaagagctggatctgtacgctaacatccgtccgacttacaacttcgacaacctggatttcgttatcatccgtgaaaacactgaaggtctgtacgttaagaaagaatactacgacgagaaaaacgaagttgctatcgctgaacgtatcatctccaagttcggttcttctcgcatcgttaaattcgcattcgactacgcagtacagaacaaccgtaagaaagtttcctgcatccacaaagcgaacgttctgcgcgtaactgacggtctgttcctggaagttttcgaagaaatgtccaagcactacgaaaaactgggtatcaaatctgacgactacctgatcgacgcaactgcgatgtacctgatccgtaacccgcagatgttcgacgttctggttactaccaacctgttcggtgacatcctgtctgacgaagcagctggtctgattggtggtctgggtatgtctccgtctgctaacatcggtgacaaaaacggtctgttcgaaccggttcacggttctgcaccggatatcgctggtaaaggtatctccaacccgatcgcgactatcctgtctgctgcaatgatgctggatcacctgaaaatgaacaaagaagctgaatacatccgtaaagcggttaagaaaaccgttgaatgcaaatacctgactccggacctgggtggtaacctgaaaactttcgaagttactgaaaagatcatcgaatccatccgttctcagatgattcaa

SEQ ID NO: 222 - protein, 339 aa, Methanococcus maripaludis S2; identical to SEQ ID NO: 36

SEQ ID NO: 223 - DNA, 1020 bp, Methanococcus maripaludis S2
  misc_feature (1)..(1020): Wild type
atgagaaacactcccaaaatttgtgttatcaatggtgacggtattggaaacgaagtagttcctgaaacggtgcgagttttaaatgaacttggtgacttcgaattcattcatgcccatgcaggttacgaatgttttaaaagatgtggcgatgcgataccagaaaacacaattgaaattgcaaaagaatctgattgtattttatttggatcagttaccactccaaaaccgactgaattaaaaaataaatcatatagaagtccaatattaactttaagaaaagaacttgacctttatgcaaatattaggccaacttataactttgataatcttgattttgttataattcgagaaaatactgaaggactctatgtaaaaaaagaatattacgacgaaaaaaacgaagttgcaattgctgagcgaataatttcaaaatttggaagttctagaattgtaaaatttgcttttgattatgcggttcaaaataacagaaaaaaagtatcctgcatacataaagcaaacgtattacgggttactgacggattatttttagaagttttcgaagaaatgtctaaacattacgaaaaattaggaataaagtctgatgactacctaattgacgcgacagcaatgtatttgattagaaacccgcaaatgtttgatgtattggttacaacaaatctttttggagatattttatctgatgaagctgcaggacttattggcggacttggaatgtctccttcagcaaacattggtgataaaaacggattatttgagccagttcatggatctgcaccagacattgctggaaaaggaatttcaaacccgattgcaacaatattgagtgctgcaatgatgcttgaccatttaaaaatgaataaagaagccgaatacattagaaaagcggttaaaaaaacggttgaatgtaaatatttaactcctgatcttgggggaaacttaaaaacttttgaagttacggaaaaaatcattgaatccataaggtctcagatgattcagtga

SEQ ID NO: 224 - DNA, 498 bp, Methanosarcina acetivorans C2A
  CDS (1)..(498)
atgatgaaaaacccgatcatcggtcgcgtatggaaattcggtgacgacatcgacactgacgttatcatcccaggtaaatatctgcgtactaaagacatgcagatcttcgctgcacacgcgatggaaggtattgctccggaattcaccaagaaagcgaagccgggcgacatcatcgttgctggcgaaaacttcggttgcggttcttcccgtgagcaggcaccgctggcaatcaagcacgctggtatcgcttgcgttgttgctaaatctttcgcacgtatcttcttccgtaacgcaatcaacgttggtctgccgctgatggaagctgacatcgaatgccaggaaggtgacgaaatcgaagttgatctgctgaaaggtgaagttcgcgttccgggtaaaggcgtattcgttggtaacaagctgccggacttcctgctggatatcctgactgacggtggtctggtttctcaccgtaagaaagcgcagaacgaacagaaagaa

SEQ ID NO: 225 - protein, 166 aa, Methanosarcina acetivorans C2A
MMKNPIIGRVWKFGDDIDTDVIIPGKYLRTKDMQIFAAHAMEGIAPEFTKKAKPGDIIVAGENFGCGSSREQAPLAIKHAGIACVVAKSFARIFFRNAINVGLPLMEADIECQEGDEIEVDLLKGEVRVPGKGVFVGNKLPDFLLDILTDGGLVSHRKKAQNEQKE

SEQ ID NO: 226 - DNA, 501 bp, Methanosarcina acetivorans C2A
  misc_feature (1)..(501): Wild type
gtgatgaaaaaccccatcataggccgagtctggaaattcggagacgacatagacactgatgtgattatcccgggaaaatacctgcggacaaaggatatgcagatttttgcagctcatgcgatggaaggtattgctcctgagtttacgaaaaaggcaaagcccggagatattattgttgcaggagagaatttcgggtgcggttcctcaagggaacaggctcctcttgctataaaacatgcgggaatagcctgcgttgtggcaaagtcctttgcaagaatctttttcagaaatgcgattaacgtggggctgcccctgatggaggctgatattgagtgtcaggagggggacgagatagaagtcgacctgctcaaaggggaggtcagggttcccggaaaaggggtgtttgttggaaacaaactgcctgacttcctgctcgatatactcacagacggcggacttgtttcccatagaaaaaaagcgcaaaacgagcagaaagaataa

SEQ ID NO: 227 - DNA, 486 bp, Methanospirillum hungatei JF-1
  CDS (1)..(486)
atgactgcgctgaaaggttctggtccggctgtttgcatcggtgaagatatcgacactgacctggttatcgctggtcgttatctgcgtactaaagactggtctttctgggcacagcacgtattcgaagatctggacccgtccctggcagaacgtctgaaaggcgcagtactggttgctggtaagaacatgggctgcggttcttctcgcgaacaggctgcacgtgcgctgcacgaagctggcgttctggcggttatcgctccgtctttcgctcgtatcttcttccgtaactgcatcaacgttggtctgccgctgctggaatgcgacctgactggctgcactgacggtatgatcatcactttcgactgcactgaaggctgggttgaagttgacggtactcgctacctgttccgtccgctgtctccgcgtatgcaggaaatcctgtctaccggtggtctgattgaatactggaagcgccgtaaagagcgc

SEQ ID NO: 228 - protein, 162 aa, Methanospirillum hungatei JF-1
MTALKGSGPAVCIGEDIDTDLVIAGRYLRTKDWSFWAQHVFEDLDPSLAERLKGAVLVAGKNMGCGSSREQAARALHEAGVLAVIAPSFARIFFRNCINVGLPLLECDLTGCTDGMIITFDCTEGWVEVDGTRYLFRPLSPRMQEILSTGGLIEYWKRRKER

SEQ ID NO: 229 - DNA, 489 bp, Methanospirillum hungatei JF-1
  misc_feature (1)..(489): Wild type
atgactgctctcaaaggctccggccctgcagtctgtatcggagaggatatcgatacggatctggtgattgccggacgatacctgagaacaaaagactggagtttttgggcacagcatgtgtttgaggatcttgatccttctcttgccgaaagactgaaaggagcagtgcttgtcgccggaaagaacatgggttgcgggtcttcacgggaacaggcggcccgggctctgcatgaggcaggagttcttgctgtcatcgccccttcgtttgccagaatttttttccggaactgcatcaatgtcgggcttccgttactggaatgtgatctgaccggatgcaccgatggcatgatcatcacttttgattgcactgaagggtgggtggaggtggatgggacgcggtatctcttccggcccctctctccacggatgcaggagattctcagcaccggcggtctgattgagtactggaaacggagaaaagagcgatga

SEQ ID NO: 230 - DNA, 489 bp, Methanosphaera stadtmanae DSM 3091
  CDS (1)..(489)
atggactccatgaaaggtaaagtatggactttccgcgactgcatcgacactgacgttatcattgctggtcgttatctgcgtactttcaacccggaagatctggcggcacacgtaatggaagcagaagatccggaattctcttccaaagttggtaaaggcgacatcatcgttggcggctggaacttcggttgcggttcttcccgtgagcaggcaccggttgctatcaaaactgctggcgtatctgcggttatcgcgaagtctttcgctcgcattttctaccgtaacgctatcaacatcggtctgccggttatcactgcagacatcgaagttgacgaaggtgacatcctggaagttaacatcgaagatggtatcatcatcaacgaaactaccaagaaaactttcaaaatcaagccgttcgacgctgaaatgctggacatcctggaaaacggtggtctggttaaccagtacctgaaaaacaagaaagaagtt

SEQ ID NO: 231 - protein, 163 aa, Methanosphaera stadtmanae DSM 3091; identical to SEQ ID NO: 29

SEQ ID NO: 232 - DNA, 492 bp, Methanosphaera stadtmanae DSM 3091
  misc_feature (1)..(492): Wild type
atggatagtatgaaaggaaaagtatggacatttagagattgtatagatactgatgtaattattgctggaagatatttaagaacatttaatccagaagatttagcagcacatgtaatggaagctgaagatccagaattttcaagtaaagttggaaagggagatataattgttggtggatggaattttggttgtggatcttcaagggaacaggcaccagttgcaataaagacagcaggagtatcagcagtaatagctaaatcatttgccagaattttttatagaaatgctattaatattggcttacctgttataacagcagatattgaagtggatgaaggggatattttagaagtaaatattgaagatggaattattataaatgaaacaactaaaaaaacatttaaaattaagccatttgatgctgaaatgttggatattttagaaaatggtggtcttgttaatcaatatttaaaaaataagaaggaggtatag

SEQ ID NO: 233 - DNA, 483 bp, Methanosaeta thermophila PT
  CDS (1)..(483)
atgatccgcggtcgtgcatgggtattcggtgacgacgttgacactgacgttatcatcccaggtaaatatctgcgtactaaagatctgcgtgaactggcagaacacgtaatggaaggtctggatccgtctttctcttccaaagttcagccgggcgacgttatcgttgctggtaaaaacttcggttgcggttcttcccgtgagcaggcaccgctggcgctgaaactggcgggtatctcctgcatcgttgcgcgttctttcgctcgcattttctaccgtaacgctatcaacatcggtctgccgctgatcgaagctgacgtaatgtgcgaaccgggtgaagttgttgaagttgacctgtctcgcggtcgcgttatcgctggcggtcgtgaatacaccggtcgtaagctgccggacttcctgatggaaatcctgaacgacggtggtctggttgctcaccgccgtaagcagcgtgaacgtggtctgatc

SEQ ID NO: 234 - protein, 161 aa, Methanosaeta thermophila PT
MIRGRAWVFGDDVDTDVIIPGKYLRTKDLRELAEHVMEGLDPSFSSKVQPGDVIVAGKNFGCGSSREQAPLALKLAGISCIVARSFARIFYRNAINIGLPLIEADVMCEPGEVVEVDLSRGRVIAGGREYTGRKLPDFLMEILNDGGLVAHRRKQRERGLI

SEQ ID NO: 235 - DNA, 486 bp, Methanosaeta thermophila PT
  misc_feature (1)..(486): Wild type
atgatcaggggcagggcatgggtctttggggatgatgttgatacagatgtaataattccagggaaatacctcaggacaaaggatctgcgcgagctggcggagcacgtcatggagggtctggatccgtcgttctcatcaaaggtccagccaggggatgttatagtagcaggcaagaacttcgggtgcggctcttccagggagcaggccccgcttgccctgaagctcgcaggaatatcatgcatcgtcgcccgatccttcgccaggatattttacaggaacgccataaacatcggtctccctctcattgaggcagatgtcatgtgcgagccgggggaggtcgtggaggtagatctctcccgggggagggtcatcgcaggcggaagggaatataccggcagaaaacttccggacttcctgatggagatcctgaacgatggagggctcgtggcccacagaagaaagcaaagggagcgcggtctgatttga

SEQ ID NO: 236 - DNA, 1272 bp, Methanosarcina acetivorans C2A
  CDS (1)..(1272)
atgctgttcgactaccgtaaaggtggtctgttcctgggtactatctctgagaagatcttctctcgcgctgctggtactgaagcgaaagctaacgacttcgttctggctgacgttgactacgcaatggcgcacgacggtacttctgtactggcggttaacgcattcaaagaaatggaaatggaaaaagtatgggacccgtcccgcatcgttgttccgttcgaccacatcgcgccggcaaacaacgaaacttctgcaactctgcagcgtgaaatccgtgaatgggttaaagagcagggtatcccgaacttctacgaagttggtgaaggtatctgccaccaggttctgccggaaaacggcttcgcgctgccaggtaagctggttgttggtgctgactctcactcctgcacctacggtgcgttcggtgcgttcgcaactggcgttggtgcaactgacatggctgaaatcttcgcaactggtaagctgtggttcaaagttccggaatccttccgtatgaccgttgaaggttctctgcgtaaaggcgtttacgctaaagacctgactctgtacctgattggtaagactggtattgctggcgcaacttacaaagcggttgaattctacggtcaggctatccgtgaactgaccgttgctggtcgtatgactctgtgcaacatggctatcgaaatgggtgcgaaaaccggtatcgttccgccggacgaaaagactttcgaattcctgaaaaaccgcgctgctgcaacttacgaaccggtttacgctgacccggatgctgtttacctggaagagttcacttacgacgctgatgacatcgaaccacaggttgcttgcccgcaccaggttgacaacgttaagccggttggtgaagttgaaggtactcacgttgaccaggtattcatcggtacttgcaccaacggtcgtctggaagatctggaagttgctgctgcggtactgaaaggtaaacaggttgctgttcgtactatcgttatcccggcatctcgcactactctgctggcagctatcgaaaacggcaccatggaaactctgctgaaagctggcgtaactctggcaactccgggttgcggtccgtgcctgggtgcacaccagggcgtactgggtgaaggtgaagtttgcgtatctactgctaaccgtaacttcaaaggtcgtatgggtaaaggcggcttcatctacctggcttctccggcaactgcggcagcttctgcgctgactggcgaaatcactgatccgcgcactgtc

SEQ ID NO: 237 - protein, 424 aa, Methanosarcina acetivorans C2A
MLFDYRKGGLFLGTISEKIFSRAAGTEAKANDFVLADVDYAMAHDGTSVLAVNAFKEMEMEKVWDPSRIVVPFDHIAPANNETSATLQREIREWVKEQGIPNFYEVGEGICHQVLPENGFALPGKLVVGADSHSCTYGAFGAFATGVGATDMAEIFATGKLWFKVPESFRMTVEGSLRKGVYAKDLTLYLIGKTGIAGATYKAVEFYGQAIRELTVAGRMTLCNMAIEMGAKTGIVPPDEKTFEFLKNRAAATYEPVYADPDAVYLEEFTYDADDIEPQVACPHQVDNVKPVGEVEGTHVDQVFIGTCTNGRLEDLEVAAAVLKGKQVAVRTIVIPASRTTLLAAIENGTMETLLKAGVTLATPGCGPCLGAHQGVLGEGEVCVSTANRNFKGRMGKGGFIYLASPATAAASALTGEITDPRTV

SEQ ID NO: 238 - DNA, 1275 bp, Methanosarcina acetivorans C2A
  misc_feature (1)..(1275): Wild type
ttgttatttgattatcggaaaggaggcttatttctgggaacaatcagcgagaaaatcttttcccgggcagcgggaacagaggcaaaagctaacgattttgtgctggcagatgtggactatgcaatggcgcatgacggcacatcggtacttgccgtgaatgcttttaaggaaatggagatggaaaaggtctgggacccttcaaggatcgtagtcccctttgaccacatcgcgcctgcgaataatgagacctcagccaccctgcagagagagatcagggaatgggtaaaggagcaggggatccctaacttctatgaggtcggggaagggatctgtcaccaggtccttccggaaaacggttttgcattgcccggaaagctggttgttggggctgattcgcattcctgcacgtacggggcttttggagcttttgcaacaggggtaggggctaccgatatggctgaaatctttgctacgggaaaactctggtttaaggttccggaaagcttcaggatgacggttgaagggagccttcggaaaggggtctatgcaaaggatctgactctttacctgatcggaaagaccggaattgccggggcgacctataaagcagttgagttttacgggcaggcaatccgcgaacttacggttgctggcaggatgacgctctgcaatatggcaattgagatgggcgcaaagaccgggatcgtccctccggacgaaaagaccttcgagttcctgaaaaacagggcagcagctacttatgaacctgtctatgccgacccggatgctgtttatctggaagagttcacttatgatgccgacgatatcgaaccccaggttgcctgcccgcatcaggtggataatgtaaagcccgtaggagaggttgaaggcactcatgtagaccaggtctttatcgggacgtgcacgaacggcaggcttgaagacctcgaggtcgcagcagcagtcctgaaaggaaaacaggttgcagtcaggacaattgtgatccctgcctctcgcaccaccctccttgcagcaatcgaaaacgggacaatggaaactctgctgaaagccggggtaacccttgcaaccccgggctgcggaccctgcctcggtgcccatcagggggtgctcggagaaggcgaggtctgcgtttcaaccgcaaacaggaacttcaaaggcaggatgggaaaaggcggttttatttatcttgcatctccagcaactgcagcagcctcggccctgacaggagaaatcaccgatccgaggacagtttga

SEQ ID NO: 239 - DNA, 1212 bp, Methanospirillum hungatei JF-1
  CDS (1)..(1212)
atggttactctgtctgagaagatcctgggtgcaccggcaggcacttacatcgaccgtcacatcgaccgcgcattctgccacgacggtactggtattcaggcgaagatcatctacgacgcgatgggcgcaccgggtatcgctaacccggactccgtttacatcatctacgaccacattgctccggctaacaactctcagactgcagaactgcaggctgaactgcgtactctggcgcgtgaatgcggtgttcacttctgggatatcggttctggtatctgccaccaggtaatggctgaaggtcaggttgctccgggtgaagttgttatcggtgctgactctcactcctgcactctgggtgcgctgggtgcattcgctaccggtgttggtgcatctgacatggctggtatctgggtttctggtgaaacctggctgcgcgttccggactccatcggtatccacctgtctggttctctgaagcagggcgttgagtggaaagacgttgcgctgacttacgttgctcgcctgggtatggacggtgcaacttacgctgcgctggaattcatcggtgaatccactccgtctgtaccgatggaaggtcgtctgactctgtgcaacatggctgttgaagcaggcgcgaaaaccggtctgttctacgctgacaaagaaactgaacgttacctggctgaatactccgtaccatgcccgatgcaagttctggaaaacccagactacgttcaggactgctacctggatctggctgacatcgaaccggtttgcgcagtaccgcaccgcgttgacaccgtacagccggttccggcactggcgggtactcacctggatcaggttttcatcggtacttgcaccaacggtcgtttcgaagatctggctcgcgctgcgcgtatcctgaaaggtcgtcgcgttaaagttcgtactatcgttgttccggcatctgaacgtgacttcctgaaagcaatcctgtctggtgttgctgctgacctggtacaggctggctgcaccatcggtccgccgggttgcggtccgtgcctgggtgcgcacatgggcgttctgggtgaaggtgaagttgcgctgtctactgcaaaccgtaacttcaaaaaccgtatgggcgtaggtgcttcttactacctgtgctctccgtctactgctgctgcatctgctatctacggtgaaatcactgacccgcgtgaagtcgtt

SEQ ID NO: 240 - protein, 404 aa, Methanospirillum hungatei JF-1
MVTLSEKILGAPAGTYIDRHIDRAFCHDGTGIQAKIIYDAMGAPGIANPDSVYIIYDHIAPANNSQTAELQAELRTLARECGVHFWDIGSGICHQVMAEGQVAPGEVVIGADSHSCTLGALGAFATGVGASDMAGIWVSGETWLRVPDSIGIHLSGSLKQGVEWKDVALTYVARLGMDGATYAALEFIGESTPSVPMEGRLTLCNMAVEAGAKTGLFYADKETERYLAEYSVPCPMQVLENPDYVQDCYLDLADIEPVCAVPHRVDTVQPVPALAGTHLDQVFIGTCTNGRFEDLARAARILKGRRVKVRTIVVPASERDFLKAILSGVAADLVQAGCTIGPPGCGPCLGAHMGVLGEGEVALSTANRNFKNRMGVGASYYLCSPSTAAASAIYGEITDPREVV

SEQ ID NO: 241 - DNA, 1215 bp, Methanospirillum hungatei JF-1
  misc_feature (1)..(1215): Wild type
atggtgacattatcggagaagattctaggtgccccggccggcacgtatattgatcgacatattgaccgggcattctgccatgacgggaccgggattcaggcaaagataatctatgatgcaatgggggctccgggtattgcaaatccggattctgtctacattatttatgatcatattgctccggcgaacaactcccagactgcagaactccaggcagagctccggacccttgccagagagtgcggggtgcatttctgggatatcggctctggtatatgtcatcaggtgatggcagaagggcaggtggcaccaggggaggttgtcatcggagctgattctcattcatgcacactcggtgctctcggggcgtttgcaaccggcgtcggggcaagtgacatggcaggtatctgggtgtctggtgagacctggctgagggttcctgattcaatcggcattcatctctccggatccttaaagcaaggcgttgagtggaaggatgttgcgctgacctatgtggcacggctcgggatggacggagcaacctatgcagccctggagttcattggtgaatccactccgtcggttcccatggaaggacgactgacattatgcaatatggcggttgaggccggggcaaagaccgggctcttttatgcagacaaggagacagagcgatatctcgcagagtattctgttccctgtccgatgcaggttttggaaaacccggactatgtgcaggactgctatcttgatctcgcagatattgagccggtatgtgcggttcctcaccgggtggatactgtccaaccggttccggcccttgcaggtacccatcttgatcaggtctttatcgggacctgtacgaacggccggtttgaagatctcgcacgtgctgccaggattctgaaaggacgccgggtaaaagtcagaaccattgttgttccggcatcagagcgtgatttcctcaaggctattttgtcaggggttgctgctgacctcgtgcaggcaggatgtaccatcggaccgcccggctgtggtccctgccttggtgcccatatgggtgttctgggtgagggtgaagtagccctttcaaccgcaaaccggaactttaagaaccggatgggtgtgggggcttcgtattatctctgttcaccctccactgctgcagcaagtgccatatatggtgagattactgatccaagggaggttgtatga

SEQ ID NO: 242 - DNA, 1245 bp, Methanosphaera stadtmanae DSM 3091
  CDS (1)..(1245)
atgaacatctctgaaaagattctggcgaaagcgtctaacaaagaagaagtttctccgggcgacaccatcactgctaacatcgacgttgcaatgtctcacgacggtacttctccgccaaccatcaaagtattcgagaagatcgctgacaaagtatgggatccggaaaagatcgttctggtattcgaccacgttatcccggctaacaccatcggttctgctgaattccaacaggttgttcgtgaattcggtaagaaacagaaaatcccgaacatgtacattcagggcgaaggtgtttgccacgaagttctgccggactacggtcacgttaagccgtctaccgttatcgttggtgctgactctcacacctgtacttacggcgcattcggtgcgttctctaccggtctgggtgcaactgacctggcaatggtttacgcaactggtcagacctggttcaacgtaccggaatctctgaaaatcaacgttaacggtactctgaacgaaaacgtttactccaaagacgttatcctgaaaatcatcaaagaactgggtgcatacggtgcaacttacaaatctctggaattccacggtgacaccatcgacaacatgtccgttgcttctcgcctgaccatgactaacatggctatcgaatgcggtgcgaaaaacggtatcatggttccgaacaagcagactaaagaatacctgtctcagcgtggtatcactgactacaccatcaccactgcgtctaaagacgctgaatacgagaagatctacgacttcgacgttgacgatctgcagccgcagatcgcttgcccgcacaacgttgacaacgttgaagatatcgacaaagttgctggtactcacatcgaccaggcggtactgggttcctgcaccaacggtcgttacgaagatctgctgcaggctgcagaagttatcgaaggtcacaaaatccacgaagatgttgaactgctggtattcccggcatctcgccacgtttacgaaaaagctatcgaaaccggtgttatccagactctgctgaaatctaacgcgattatctgcaacccaggttgcggtccgtgcctgggtgcacacatgggcgtaatgactgacgacatgacttgcatctccaccactaaccgtaacttcctgggtcgtatgggttctgcgaagtcttacgtttacctgtctaacccggctgttgttgctgcttctgctatcaaaggtgaaatcactaacccgtctgagatc

SEQ ID NO: 243 - protein, 415 aa, Methanosphaera stadtmanae DSM 3091; identical to SEQ ID NO: 19

SEQ ID NO: 244 - DNA, 1248 bp, Methanosphaera stadtmanae DSM 3091
  misc_feature (1)..(1248): Wild type
atgaatataagtgaaaaaatacttgcaaaagcatcaaataaggaagaagtaagtcctggagatacaattactgcaaatatagatgttgcaatgagtcatgatggaacaagtcctcctacaataaaagtatttgaaaaaatagctgataaagtatgggatccagaaaaaatagttcttgtattcgatcatgtgattcctgcaaacacaatcggatctgctgaatttcaacaggtagtaagagaatttggtaaaaaacaaaagattccaaacatgtatattcaaggagaaggagtttgtcatgaagtacttccagactatggtcatgtaaaaccttcaacagtaatagttggagcagattcacatacatgtacatatggtgcttttggtgcattctcaacaggacttggagctacagatcttgcaatggtatatgcaactggacaaacatggtttaatgttccagaatccttaaaaataaatgttaatggtacattaaatgaaaatgtatactctaaagatgtaattctaaaaataattaaggaattaggtgcctatggtgctacttataaaagtcttgaattccatggtgatacaattgataatatgtctgtagctagtagattaacaatgacaaatatggcaattgaatgtggagctaaaaatggtataatggtacctaataaacagacaaaggaatatctctcacaaagaggaataactgattatactattactactgctagtaaagatgcagaatatgagaaaatttatgactttgatgttgatgatcttcaaccacaaattgcatgtccacataatgtagataatgttgaagatatagataaagtagcaggtactcatatagatcaagcagtacttggttcatgtaccaatggacgttatgaagatttacttcaagcagctgaagttattgaaggacataaaatacatgaagatgttgaattactagtattcccagcatcaagacatgtgtatgaaaaagcaatagaaacaggtgttattcaaacattacttaaatcaaatgcaattatatgtaatcctggatgtggaccatgtcttggagcacatatgggtgtaatgacagacgatatgacttgtatttccactactaatagaaatttccttggtagaatgggtagtgctaagtcatatgtatatctatcaaatccagcagttgttgcagcttcagcaataaaaggtgaaattacaaatccaagtgagatataa

SEQ ID NO: 245 - DNA, 1140 bp, Methanosaeta thermophila PT
  CDS (1)..(1140)
atgtctcacgacggtacttctgtactggcaatcaaagcgttccgtgaaatgggttctgaaaaagtatgggacaagtctcgcatcgttatcccgttcgaccacatcgttccggctaacaacgaaactgctgcaactctgcaggctgaagttcgtcgctgggcgcgtgctcagggtatcgaaaacttctacgactgcggtcacggtatctgccaccaggtattctgcgaaatgggcttcgcactgccgggtgcgctggttgttggtgctgattctcactcctgcacctacggtgcgctgggtgcattcggtactggcgttggtgcaactgacatggctgaaatctactctcgcggtcgtctgtggttccgcgtaccggaaaccatctgcatgcgtctggaaggtactctgggtgacatggtttctgcgaaagacctggcgctgttcgttgttaaagagatgggtgctgacggtgctaactacatgtccgttgagttcgttggtggtgctgttgaacgtctgtctatctccggtcgtatgactctgtgcaacatgggcgttgaaatgggtgcgaaagctgctatcgttccgccggacgaatccgttgacgcttacctggcacgtcgtgctcgccgtccgtacactcacattcactctgatccgggttcttactaccgtgaaatcgaatacgacgtttctgacattccgccgatgatcgctgcaccgtaccgcgttgacaacgttcacccggtacgtgacctggctggtatcgaagttgatcaggtattcatcggtacttgcaccaacggtcgtctggaagatctggaaatggctgctcgcatcgttaaaggtaagcgcgttaagatccgtactctggttatcccggcatctcgcgaaatctacctgggtgcgctgcgttctggtgttatcgaaactctggttgaagcgggtgcgatgatcggtccgccgggttgcggtccgtgcctgggtgcacacatgggcgtactgggtgacggtgaagtttgcctgtctacttctaaccgtaacttcccaggtcgtatgggtcgtaacggtaaagtttacctggcttctccggcaactgctgcagcaactgctatcaccggtaaaatcactgaccctcgg

SEQ ID NO: 246 - protein, 380 aa, Methanosaeta thermophila PT
MSHDGTSVLAIKAFREMGSEKVWDKSRIVIPFDHIVPANNETAATLQAEVRRWARAQGIENFYDCGHGICHQVFCEMGFALPGALVVGADSHSCTYGALGAFGTGVGATDMAEIYSRGRLWFRVPETICMRLEGTLGDMVSAKDLALFVVKEMGADGANYMSVEFVGGAVERLSISGRMTLCNMGVEMGAKAAIVPPDESVDAYLARRARRPYTHIHSDPGSYYREIEYDVSDIPPMIAAPYRVDNVHPVRDLAGIEVDQVFIGTCTNGRLEDLEMAARIVKGKRVKIRTLVIPASREIYLGALRSGVIETLVEAGAMIGPPGCGPCLGAHMGVLGDGEVCLSTSNRNFPGRMGRNGKVYLASPATAAATAITGKITDPR

SEQ ID NO: 247 - DNA, 1149 bp, Methanosaeta thermophila PT
  misc_feature (1)..(1149): Wild type
atgtcgcacgacggcacaagcgtccttgccataaaggcattcagggagatggggtcagagaaggtctgggataaaagcaggatagtaataccgttcgatcacatcgtgcccgcaaacaatgagaccgctgcgacgcttcaggcggaggtgagaagatgggcgagggctcaggggattgagaacttctacgactgcggtcatggcatatgccaccaggtcttctgcgagatgggtttcgctcttcctggggcgcttgtcgtgggcgccgactctcattcctgtacttatggtgcactcggcgcattcggaacaggtgtgggcgccacggacatggctgagatctattcccgcgggaggctatggttcagagtgccggagacgatatgcatgcgccttgagggcactctgggtgatatggtatcagcaaaggatctcgccctcttcgtggtgaaggagatgggcgcggatggcgccaactacatgtccgtggagttcgtcggcggggctgtggagaggctgagcatatcaggcaggatgactctgtgcaacatgggtgttgagatgggagcaaaggctgcgatcgtcccgccggatgagagcgtcgacgcatacctcgctagaagagccagacgtccatacacgcacatccactcagacccgggatcatactacagagagatcgagtacgatgtgagcgatattcctccaatgattgcggctccataccgcgttgacaatgttcatccagtcagggatctggcaggcatcgaggtggaccaggtattcatcggcacatgtaccaacggaaggctggaggatctggagatggcagcccggatcgtgaagggcaaaagggttaagatcagaacgcttgtgatccccgcctccagagagatatatcttggtgctctgagatctggggtaattgagacccttgtcgaggccggcgcgatgatcggcccgccgggatgcggtccatgccttggcgcacacatgggagttctgggcgacggagaggtctgtttgtccacatcaaacagaaacttcccgggaaggatgggcagaaacggaaaggtctacctggcatcgcctgcaactgccgcagccacggcgatcacaggaaagatcacagatccaagggacgtatga

SEQ ID NO: 248 - DNA, 993 bp, Methanosarcina acetivorans C2A
  CDS (1)..(993)
atgaagctggcggttatcgaaggtgacggtatcggtcgtgaagttatcccggctgctgttgaagttctggacgcattcggtctggaactggaaaaagtttctctggaactgggttacgctcgctgggaacgtactggttctgcgatttctgaagaagatatcgcaactatcaaaggctgcgacgcagtactgttcggtgcggtaactaccgttccggatccgtcttacaaatctgtactgctgactattcgtaaagagctggacctgtacgctaacgtacgtccggttaagccgctgccaggtatcaccggtgttaccggtcgtaacgacttcgacttcatcatcgttcgtgaaaacactgaaggtctgtactccggtatcgaagaaatcggtccggacctgtcctggaccaagcgcgttgttactcgtaaaggttctgaacgcgttgctgaatacgcttgcaaactggcgaagcagcgtaaaaacaaactgactatcgttcacaagtctaacgtactgaaatctgacaagctgttcctggacgtttgccgtcaggttgcttcttctcacggtgttgaatacggtgacatgctggttgattccatggcttactctctgatgatgcgtccggacaaatacgacgttgttgttaccactaacatcttcggtgacatcctgtctgatatgtgcgcagcactggttggttctctgggtctggttccgtctgctaacatcggtgaaaaatacgcattcttcgaaccggttcacggttctgcaccggacatcgctggtaaaggtatcgctaacccgctggctgctatcctgtgcgtaaaaatgctgctggaatggtctggtcgcggtaaagaagcggcactgatcgaccgcgctatctcttacatcctggagaagaaactgatcactccggacctgggtggtgtttctaccactgcagaagttggtcagactgttgcgaaatacgtaatgcagaacctg

SEQ ID NO: 249 - protein, 331 aa, Methanosarcina acetivorans C2A
MKLAVIEGDGIGREVIPAAVEVLDAFGLELEKVSLELGYARWERTGSAISEEDIATIKGCDAVLFGAVTTVPDPSYKSVLLTIRKELDLYANVRPVKPLPGITGVTGRNDFDFIIVRENTEGLYSGIEEIGPDLSWTKRVVTRKGSERVAEYACKLAKQRKNKLTIVHKSNVLKSDKLFLDVCRQVASSHGVEYGDMLVDSMAYSLMMRPDKYDVVVTTNIFGDILSDMCAALVGSLGLVPSANIGEKYAFFEPVHGSAPDIAGKGIANPLAAILCVKMLLEWSGRGKEAALIDRAISYILEKKLITPDLGGVSTTAEVGQTVAKYVMQNL

SEQ ID NO: 250 - DNA, 996 bp, Methanosarcina acetivorans C2A
  misc_feature (1)..(996): Wild type
atgaaactcgcggtaatcgaaggtgatgggatcggcagggaagtaattcccgcagctgttgaagtcctggacgcgttcggacttgagcttgagaaagtgtctctggaactgggctatgcaagatgggaacggacagggagtgcgatctcggaagaagatatagccacaataaaagggtgcgacgctgttcttttcggggcggttaccacagtacctgacccgagttacaaaagtgtgcttctgacaatccgaaaggaacttgacctctatgccaatgtgaggcccgtaaaacctctccccggcataacgggcgttaccgggagaaatgatttcgattttattattgtcagggaaaatacggaaggactctactccgggattgaggaaataggccctgacctttcctggacaaaaagagtagttacccgaaaaggctctgagagggttgcagaatacgcctgcaagcttgcaaaacagagaaagaacaaacttaccattgtccacaaatccaacgtcctgaagtccgacaaactcttccttgatgtctgccggcaggttgccagctcccatggggtggaatatggcgacatgctggtcgattctatggcttatagccttatgatgcgccccgataagtacgatgttgtggttactacaaacatttttggagatatcctgagcgacatgtgcgcagcccttgtgggaagcctggggcttgtcccgagcgccaatataggggagaaatacgcctttttcgagcccgtacacgggagcgctccggacatcgcaggaaaaggtattgcaaaccctcttgcggcaatcctctgcgtgaagatgctgcttgaatggagtggcagggggaaagaagctgctcttattgacagagctatcagttacatactggaaaagaagctcatcactcctgacctcgggggcgtcagcaccacagcagaagtcgggcagacggtagcgaagtatgtaatgcagaatctttaa

SEQ ID NO: 251 - DNA, 987 bp, Methanospirillum hungatei JF-1
  CDS (1)..(987)
atgaagcgcgttgttgttgctccgggcgacggtatcggtccggaagttatcccgtctgcactggaagttctgcgcttcttccacccggaatgggaatacatcccggtttacctgggttacgaatgctggaaacgtactggcgacgcactgtctcagcgtactctggaaactctgaagaaagctgacctgatcctgttcggtgctatcaccactccgccagacccgaaataccactctgttgttctgcgtatccgtaaagagctggatctgtacgctaacctccgtccggtattcggtgaaggcttcgacatcctgatcgttcgtgaaaacactgaaggtctgtactccggtatcgagtggcaggaaaaagaccgcgcttgcactctgcgcgttgtttctgaagcgggttctcgccgtatcgctcgcttcgcttgcggttgcgcgaagcgtcgtcgtcgtcacctgactatcggtaacaaagctaacgttctgaaatctgactcctacttcctggatatctgcatggaagaagcagaaaaagctggtatctccatcgacaagaaatacatcgactctctggtactggacgtactgcagcacccaggtcgttacgacgttatcgttactaccaacatcttcggtgacatcctgtctgacgcagcagcattcctggaaggtggtctgggtatgctgccgtctgctaacatcggtcgtcaccaggcactgttcgaaccggttcacggttctgcgccggatatcgctggtaaaggtctggctaacccgatcgctgcaatccgctgcgtatctctgctgctgaaatacgttggcgagaagccgtctgcgattgaagttgaaaaagcgattcagaaaactatcgctgacggtatcaaaactccggatctgggtggtactgcgaccactgaagaagttggtcgtgcggtactgtctcacctggcttcttccaagaaagcagaaggtccggacctc

SEQ ID NO: 252 - protein, 329 aa, Methanospirillum hungatei JF-1
MKRVVVAPGDGIGPEVIPSALEVLRFFHPEWEYIPVYLGYECWKRTGDALSQRTLETLKKADLILFGAITTPPDPKYHSVVLRIRKELDLYANLRPVFGEGFDILIVRENTEGLYSGIEWQEKDRACTLRVVSEAGSRRIARFACGCAKRRRRHLTIGNKANVLKSDSYFLDICMEEAEKAGISIDKKYIDSLVLDVLQHPGRYDVIVTTNIFGDILSDAAAFLEGGLGMLPSANIGRHQALFEPVHGSAPDIAGKGLANPIAAIRCVSLLLKYVGEKPSAIEVEKAIQKTIADGIKTPDLGGTATTEEVGRAVLSHLASSKKAEGPDL

SEQ ID NO: 253 - DNA, 990 bp, Methanospirillum hungatei JF-1
  misc_feature (1)..(990): Wild type
atgaagcgggttgttgtggctcccggtgatggtatcggacctgaagtaataccttctgcacttgaggtgcttcggttctttcatcctgagtgggagtatattccggtatatttggggtatgagtgctggaagagaaccggagatgcattgtcacaaaggacacttgaaacgctcaaaaaggcggatctaatcctgtttggtgcgattacaacacctcctgatccgaagtatcacagtgtggtgctacggattcgaaaggaactggatctctatgcaaatctccgcccggtattcggagaagggtttgatattttgatcgtgcgggagaataccgaggggctctattcaggtatcgaatggcaggagaaggatcgtgcctgtaccctccgtgttgtcagtgaagcaggatcgcgtcggattgccagatttgcttgtggctgtgccaagcggagacgaagacatctgacaatcggcaataaggcaaatgtcctgaagtctgactcttatttccttgatatctgcatggaggaggctgaaaaggcaggaatatccatagataaaaagtatatcgactcactggttcttgacgtcctgcagcacccaggccggtatgatgtcattgtgacgacgaacatctttggggacatcctttcagatgcggctgcatttctggaagggggccttgggatgcttcccagcgcaaatattggacggcatcaggcactcttcgaaccagttcatggcagtgcccctgatattgccgggaagggtcttgcaaatcccatcgcagccatcagatgtgtatccctgcttcttaagtatgtcggagagaagcccagtgctattgaagtggaaaaggcgattcaaaagaccatcgccgacgggataaagactcctgatctcggaggtactgcaacaactgaggaagtgggacgggcagtcctatcacatcttgcatcatcaaaaaaggcagagggtccggacctctga

SEQ ID NO: 254 - DNA, 969 bp, Methanosphaera stadtmanae DSH 3091
  CDS (1)..(969)
atgtacaaaatcaccgttatcccaggtgacggtatcggtcaggaagtaatgcagccgactatcgacatcctggaaactctgaactccaagttcgaattcatcccgaaagaagctggtaaagagtgctaccagaaatacgataccaatctgccggaagaaaccatcgttcagtgccgcgaatctgactccactctgttcggtgcggtaacttccatcccgcagcagaagtctgcaatcgttactctgcgtaaagagctggatctgtacgttaaccagcgtccgatccactcttacaccaacccggatatcgacttcactatcatccgtgaaaactctgaaggtctgtactctcacatcgaagaatccactggcgacgaagctatcgctatccgtaagatcacttacaaagcgtctgaacgtatcatcaactacgcattcaactacgcactgaaaactgaaaaatctaaagttactgcttctcacaaagctaacgttctgccggtaactgacggtatcttcaagaacaccttctacaaagttgcttctaactacccgactatcaagtctaacgactactacatcgacgcaatggcgatgtacctgatcactaacccggcacagttcgacatcatcgttactaccaacctgttcggtgacatcctgtctgacgaaggtggtggtctggttggtactctgggtctgattccgtctgctaacatcggtgacaaaaccggtctgttcgaaccggttcacggttctgcaccggacatcgctggtctgaacaaagctaacccgatcgcgatgatcctctcttcctgcctgatgctggaatacctgggtctgtacgacgacgcgaagcgcattcagaacgctgttgaagaaaccatttctgaatccaaagttaaaactccggatatgggtggtcacaacaacactcaggacgttgctaacaacatcctgcacagacta

SEQ ID NO: 255 - protein, 323 aa, Methanosphaera stadtmanae DSH 3091; identical to SEQ ID NO: 39

SEQ ID NO: 256 - DNA, 972 bp, Methanosphaera stadtmanae DSH 3091
  misc_feature (1)..(972): Wild type
ttgtataaaataacagtaatacctggtgatggtataggacaagaagttatgcaaccaacaatagatattcttgaaacattaaattctaaatttgaatttataccaaaagaagcaggaaaagaatgttatcaaaaatatgatacaaatctacctgaagagactattgttcaatgtagagaaagtgatagtacactctttggagcagtaacatcaattccacaacaaaaaagtgcaatagtgacattacgtaaagaacttgatttatatgtaaatcaaagaccaatacattcatatacaaatccagatatagattttacaataatacgtgaaaattctgaaggactatattcacatattgaagaaagtactggtgatgaagcaatagccattagaaaaataacatacaaagcttcagaaagaataataaattatgcttttaactatgcacttaaaacagaaaaaagtaaagtaacagcatcacataaagcaaatgtactaccagtaactgatggaatatttaaaaatacattctataaagtagcaagtaattatccaacaatcaaatccaatgattattatatagatgctatggcaatgtatcttataacaaatcctgctcaatttgatattatagtaacaacaaatctctttggagacatattatctgatgaaggtggaggattagttggaactcttggacttataccttcagcaaatattggggataaaactggattatttgaaccagtacatggatcagcaccagatatagcaggacttaataaggcaaatccaatagcaatgatcttatcaagttgtttaatgcttgaatatttaggattatatgatgatgcaaaaagaattcaaaatgcagtagaagaaacaatttctgaaagtaaagttaaaacaccagatatgggtggacataacaatacacaagatgttgcaaataatatactccatagattataa

SEQ ID NO: 257 - DNA, 969 bp, Methanosaeta thermophila PT
  CDS (1)..(969)
atgaagaagatcgctctggttccgggcgacggtatcggtccggaagttatctcttccgcactgcgcgtactgaacgcagcaggcttcgacggtgaactggttgaattcgacatcggttacggtcgctggcgtcgcgacggtaaagcgatcactgacgacgatatcgaacgtatgaaagactgcgactgcatcctgttcggtgcaatcaccactccgccggatccgggttaccgttctgtactgatccgcattcgtaaagagctggatctgtacgctaacatccgtccgctgcgttcttctcgcatcgacgttatcatcgttcgtgaaaacactgaaggtctgtactccggtctggaaatgctgggtgacgaagaagcgcgtaccgttcgcgttatcactcgtaaaggttctcagcgtattgctgaagttgcttgccgtatcgcttctgaacgtaagcacctgactatcatccacaaagctaacgtactgaaatctgacgttctgttcctgaaaacttgccgtgaagttgctgaacgttacggtatccgctacgacgacatgctggttgacgctgctgcttacaacatggttatccgtccggaaatgttcgacgtaatggttactaccaacctgttcggtgacatcctgtctgacgaaggtgcgggtatcgttggttctctgggtctgtgcgcatctgctaacctgggtgaccgctgggcgctgttcgaaccaatccacggttctgcaccggatatcgctggtaacggtattgctaacccggttggtgcaatccgttctgcagcaatgatgctggagtggttcggtgaaatggaacgtgctcagtctatccaccaggcggttgaccgtactctgtctaaaggcgttaaaactccggatctgggtggtctgtgcaccacttctgaattcactgacgcggttatcgacgaaatgcgtcgcgctggcgcgtgt

SEQ ID NO: 258 - protein, 323 aa, Methanosaeta thermophila PT
MKKIALVPGDGIGPEVISSALRVLNAAGFDGELVEFDIGYGRWRRDGKAITDDDIERMKDCDCILFGAITTPPDPGYRSVLIRIRKELDLYANIRPLRSSRIDVIIVRENTEGLYSGLEMLGDEEARTVRVITRKGSQRIAEVACRIASERKHLTIIHKANVLKSDVLFLKTCREVAERYGIRYDDMLVDAAAYNMVIRPEMFDVMVTTNLFGDILSDEGAGIVGSLGLCASANLGDRWALFEPIHGSAPDIAGNGIANPVGAIRSAAMMLEWFGEMERAQSIHQAVDRTLSKGVKTPDLGGLCTTSEFTDAVIDEMRRAGAC

SEQ ID NO: 259 - DNA, 972 bp, Methanosaeta thermophila PT
  misc_feature (1)..(972): Wild type
atgaagaaaatcgctcttgtgccgggcgatggcatcgggcctgaggtcatatcgagcgctcttcgtgtcttgaatgcagcaggattcgatggggagctcgtagagttcgatataggctatggcagatggaggcgtgatggaaaggccataacagatgatgatatagaaaggatgaaggattgcgactgcatactcttcggggcgatcacgactcctcctgatcctggttataggagtgtcctgataaggataagaaaggagctggacctgtatgcgaacatacgccccctgcgctcgagcaggatcgatgtgatcattgtgagggagaacaccgaggggctgtattcaggtctggagatgctcggcgatgaagaggccaggaccgtgcgtgtcataacgagaaaggggagccagaggatagccgaggtggcgtgcaggatcgcatcggaacgcaaacatctcacaataatacacaaggcgaacgtcctgaagagcgacgtgctgtttttaaaaacatgcagggaggtcgctgaaaggtatggaatcaggtatgatgatatgctggttgatgccgcggcatacaacatggtgataaggccggagatgtttgatgtgatggtgacgacaaatctcttcggggacattctcagcgatgagggcgccggcattgtcggcagcctggggctctgcgccagcgcgaatctgggcgatcgctgggcgctcttcgagccgatacacggcagcgcgcccgacattgcaggcaatggcatagcaaacccggtgggagccatacggagcgctgcgatgatgctcgagtggttcggtgagatggagagggcgcagtcgatccatcaggcggtggaccgcacgctctcgaaaggggtgaaaacgccggatctgggcggcttgtgcacgacatctgagttcacagatgcggtcatcgatgagatgaggcgcgccggagcatgttga

SEQ ID NO: 260 - DNA, 1215 bp, Methanosarcina acetivorans C2A
  CDS (1)..(1215)
atgtctgaatctgaacagtactcccgtaacaccctgatggacttcatcgaataccgtccgctggatatcgaaatctgcgacgtaactctgcgtgacggtgaacagactccgggcgtagtattcaccaaagagcagaaactggcggttgcttctgaactggactccatgggtatcgaagttatcgaagcaggcttcccggttgtttctgcttacgaaaaagaaatcgttaaagaaatcgctaaccagggttacgactcccgtatctgctgcctgtctcgcgctgttaaaggcgacgttgacgcagcactggactgcgacgttgatatcgtttccatcttcatcgcgatgtctgacatgcacctgaaatacaaataccaccgtactctggaagatatgctgggttgcgcaaaagaagctatcgaatacgcaactgaccacggtctgaacgttcgcttcgctgcagaagatgcttcccgtactccgatcgaccgcctgaagcaggcattcaaagaagttgaaaacgaatacaaagttcagtacgtttctctggctgacaccatcggtattctgaacccgactaccactcactacctggtttctgaaatcttcaaatgcgtaaacacctctatctgcatccactgccacgacgacctgggtatggcaactgcgaacaccctggcagctgctgaagctggcgcgaagcagctgcacaccaccgttaacggtatcggtgaacgcgctggtaacgcttctctggaagaaatgctggttgctctgcgcgtacagtacggtatcgaacgttacgacactaccaagctgactgcgctgtctcgtatgatctctgaatactccaacatcactccgtctgttaacaaagcggttgttggtcagaacgcattcactcacgaatccggtatccacgttgctgcgattctggaagaaccgcgtacttacgaactgttcctgccagaaatggttggtggtaagcgtaacctggttgttggtaagcacactggcaccaaagcgctgaaaggtatcatcaactccatcggcttctgcctggaacgtgaagaactgtgcgcactgatcgaaaaagttaaagtttgcactgacgagaagcgccgttctatctctcgcgagcagctggaaaaactgatcgctcaggtacgtcaggaacagaagccgtctgcttctgaaaaagagaagttctccatt

SEQ ID NO: 261 - protein, 405 aa, Methanosarcina acetivorans C2A
MSESEQYSRNTLMDFIEYRPLDIEICDVTLRDGEQTPGVVFTKEQKLAVASELDSMGIEVIEAGFPVVSAYEKEIVKEIANQGYDSRICCLSRAVKGDVDAALDCDVDIVSIFIAMSDMHLKYKYHRTLEDMLGCAKEAIEYATDHGLNVRFAAEDASRTPIDRLKQAFKEVENEYKVQYVSLADTIGILNPTTTHYLVSEIFKCVNTSICIHCHDDLGMATANTLAAAEAGAKQLHTTVNGIGERAGNASLEEMLVALRVQYGIERYDTTKLTALSRMISEYSNITPSVNKAVVGQNAFTHESGIHVAAILEEPRTYELFLPEMVGGKRNLVVGKHTGTKALKGIINSIGFCLEREELCALIEKVKVCTDEKRRSISREQLEKLIAQVRQEQKPSASEKEKFSI

SEQ ID NO: 262 - DNA, 1218 bp, Methanosarcina acetivorans C2A
  misc_feature (1)..(1218): Wild type
atgtcagagagcgagcagtactccagaaatacacttatggacttcatcgaatatcgccccctcgatatcgaaatctgtgacgtgaccctgcgcgatggggaacagacccctggtgttgtgttcacgaaagaacagaagctggcagtagccagcgagcttgattccatgggtattgaggttatagaagccggctttccggtagtttccgcatacgaaaaagaaatcgtaaaggaaatcgcaaaccagggttatgattccaggatctgctgcctctcaagagcagtaaagggagatgttgatgctgcccttgattgtgacgtcgatatcgtcagcattttcattgcaatgtccgacatgcacctcaaatacaagtaccacaggactcttgaggatatgctgggctgcgctaaggaagctattgaatatgcaactgaccacggtttaaacgtacgttttgcagccgaggatgcaagccgcactccgattgaccgcctcaagcaggctttcaaggaagttgagaacgagtataaagtgcagtacgtaagcctggcagatacaatcggtatcctgaacccgaccaccacccattaccttgtaagtgaaatcttcaagtgcgtaaacacttcaatctgcatccactgccacgatgacctcgggatggctacggctaacacccttgcagccgccgaagccggagcaaagcagctccatacgacagtcaacgggattggagaaagggccggaaacgcttctcttgaagaaatgctggttgcccttagggtacagtacggaattgaacgttatgatacaacaaagctgaccgcgctctccagaatgatttcggaatactcaaacatcaccccctcagtaaacaaagccgttgtaggccagaacgcctttacccatgagtccggaattcacgtcgctgcaatcctggaagagccgcgcacttacgaactcttccttcccgagatggtaggtggaaagcgcaaccttgttgtcgggaagcataccgggacaaaagccctgaaagggatcatcaacagtatcggtttctgccttgaacgggaagaactctgcgccctgatcgaaaaagtcaaggtctgtaccgacgaaaagcgaagaagcatttcaagggagcagcttgaaaaactgatagctcaggtcaggcaggagcagaaaccttccgccagcgaaaaagaaaagttttctatctga

SEQ ID NO: 263 - DNA, 1179 bp, Methanospirillum hungatei JF-1
  CDS (1)..(1179)
atgaagccgtggcacatcgaaatctgcgacgtaactctgcgtgacggtgaacagactccgggcgtttctttcactgctgacgagaagaaagacatcgcttctcgcctggatgctatcggtatcgaagttatcgaagcgggtttcccgatcgtttctgcacacgaaaaagaaatggttcgtaacatctcccgtctgggtctgtctgcgaaaatctgcggtctgtctcgcgcttgccgcgaggacgttgacgctgcactggatgctgaagttgacatgatcggtctgttcatcgctccgtctgatctgcacctgaaatacaaacacaagaagccgcgtgacgttgttgttgctaacgcgctggaacagctggactacgctgttgaccacggtctgatcgttcgtttcggtgcagaagatgcttcccgtactgacccggacatcctggttgacatctaccgtcaggcagctgaccacaaagcgacttacgttacttacgctgacaccactggctgcctgactccgctggaagttgcaaccgtaatgaaagacctggttccgaaaactccgattccgatcgcgatgcacgcgcacaacgacctgggttgcgcaactgctaacaccctgatcgctgcagaactgggtgcttaccagctgcacaccaccgttaacggtctgggtgaacgtgcgggtaacgcgcgtctggaagaagttctggtttctctggtactgaaaggtggtatcactcgctacgacctgactgaaatcccggcactgtctgaacgcgtacagcagtacaccggtatcttcatgccggcaaccaagccggttgttggtgctaacgcattcgctcacgaatccggtatccacattgctgcaatcctggaaaacccggaaacttacgaattcatcccgccagaactgctgggtctggaacgtcgcttcatcctgggtaagcacaccggtaaacgtgcgctggttcacattctgacttctttcggttaccacatcactgacgaacaggtaatgcaagttctggaactgatcaaagacaaatctgaagataaatgctccatcaaccagcgtgtactggcagaaatcatctctcaggttaccggtgaagataaaatcaacggtgacatcatcggcgaggactcccgctgcccaggtcgtcacgtttac

SEQ ID NO: 264 - protein, 393 aa, Methanospirillum hungatei JF-1
MKPWHIEICDVTLRDGEQTPGVSFTADEKKDIASRLDAIGIEVIEAGFPIVSAHEKEMVRNISRLGLSAKICGLSRACREDVDAALDAEVDMIGLFIAPSDLHLKYKHKKPRDVVVANALEQLDYAVDHGLIVRFGAEDASRTDPDILVDIYRQAADHKATYVTYADTTGCLTPLEVATVMKDLVPKTPIPIAMHAHNDLGCATANTLIAAELGAYQLHTTVNGLGERAGNARLEEVLVSLVLKGGITRYDLTEIPALSERVQQYTGIFMPATKPVVGANAFAHESGIHIAAILENPETYEFIPPELLGLERRFILGKHTGKRALVHILTSFGYHITDEQVMQVLELIKDKSEDKCSINQRVLAEIISQVTGEDKINGDIIGEDSRCPGRHVY

SEQ ID NO: 265 - DNA, 1182 bp, Methanospirillum hungatei JF-1
  misc_feature (1)..(1182): Wild type
atgaaaccatggcacattgaaatttgtgatgtcactcttcgggacggtgaacagacccctggagtatcattcactgctgatgagaagaaggatatcgcatcccggcttgatgcaatcggaattgaggtgattgaagccggatttcctattgtatccgcccatgaaaaggagatggtccggaatatctcccggctgggtctctcggcaaagatatgtggtctgtcacgggcctgcagggaggatgtggatgcagcgcttgatgctgaagttgacatgatcgggctttttattgccccttctgatctgcatctgaaatacaagcataaaaagccccgggatgttgttgttgcaaatgctcttgaacagcttgattatgcggtggatcatggtcttatcgtccggtttggtgctgaagatgcatcccgtaccgaccctgatatcctcgttgacatctaccggcaggcagcagatcacaaggcgacctatgtcacatatgcagatacgaccgggtgtctgacccctcttgaggtcgctacggtcatgaaggatcttgtccccaaaacgcccatcccgattgccatgcatgctcataatgatctcgggtgtgcgacggcaaatacactcattgccgcagaactgggagcgtatcagttgcataccacggtgaacggccttggtgaacgggcagggaatgcacggctagaggaggttttggtatcactcgtgctcaaaggcgggattacccggtatgatctcacagagattccggctctttcagaacgggttcaacagtataccgggatttttatgcctgcaacgaaaccggtggtcggtgcgaatgcgtttgcccatgagagtgggattcatattgcagctattctggaaaatccggagacctacgagttcatacccccagagctcctgggactggaacggcggtttatcctggggaagcataccggaaagcgtgctctggtgcatattctgacttcttttggctatcacatcaccgatgagcaggttatgcaggttcttgaattgataaaggataaaagtgaggataaatgcagtatcaaccagcgggtgcttgcggagatcatctcccaggtaaccggggaggataagatcaatggtgacattatcggagaagattctaggtgccccggccggcacgtatattga

SEQ ID NO: 266 - DNA, 837 bp, Methanosphaera stadtmanae DSM 3091
  CDS (1)..(837)
atgggtctgtctgatctgcacctggaagttaaaatcaacaagccgcgcgacgttgttaaccagatctgcatggacgctatcgactacggtaaagaccacggtctgttcgtagcattctctgcagaagatgcaactcgtactgaactgccgaaactgctggacgtttacaagcaggcgcaggaccacggtgctgaccgcattcacattgctgacaccactggttctatcaacccgtacgcaactcagtacctggttaaaaacatcaagaaagagatcgacactgaaatcgcgctgcactgccacaacgacttcggtttcgctgttgctaactccatcgctggtctgttcgaaggtgcaactgctatctccactaccgttaacggtatcggtgaacgtgctggtaacgcatctctggaagagctgatcatgtctctgaaactgctgtacaacaaagacctgggcttcaaaactgaagttatctacgaactgtctcagctggtatctaaatactccaagatcccaatctctgactccaaagcgattgttggtaacaacgtattccgtcacgaatccggtatccacgtagacgctatcgttaaaaacccgctggcttacgaaccgttcatcccggaaatgatcggcaccaagcgtcagatcgttctgggtaaacactctggtaaatctgcggttatcgaaaaactggatactctgaacatcaaagttgatgacactcagctgtctcagatcgtttctctggttaagcaggaacgtgaacgtggtgaagaaatcactaacaacaagttcgacgaaatcctggaaaaagttaacatcaaaagg

SEQ ID NO: 267 - protein, 279 aa, Methanosphaera stadtmanae DSM 3091; identical to SEQ ID NO: 9

SEQ ID NO: 268 - DNA, 840 bp, Methanosphaera stadtmanae DSM 3091
  misc_feature (1)..(840): Wild type
atgggattatcagacctacatctagaagttaaaataaacaaaccacgagatgtagtaaatcaaatatgtatggatgcaatagattatggtaaggatcatggactatttgtagcattctctgctgaagatgcaacaagaacagaacttccaaaacttcttgatgtatataaacaagcacaagatcatggagcagacagaattcatatagcagatacaacaggttcaataaatccatatgcaacacagtacttagtaaaaaatattaaaaaagaaatagatacagaaatagcactacactgtcataatgactttggatttgcagttgcaaattccattgcaggattatttgaaggcgcaactgcaatatctacaacagtaaatggtataggtgaaagagcaggaaatgcctctctagaagaattaataatgtcattaaaactattatataataaggatttaggatttaaaacagaagtaatctatgaactatcacaacttgtatcaaaatatagtaaaattccaatatcagatagtaaagctatagttggaaacaatgtatttagacatgaatcaggaatacatgtagatgcaatagtaaaaaatccattagcatatgaaccattcattccagaaatgattggaacaaaaagacaaatagttctaggaaaacattcaggtaaatcagcagtaatagaaaaattagacacattaaatataaaagtagatgacacacaattatcacaaatagtttccctagtaaaacaagaacgtgaaagaggagaagaaataacaaataataaattcgatgaaatactagaaaaagttaatattaaaagatga

SEQ ID NO: 269 - DNA, 1143 bp, Klebsiella pneumoniae
  CDS (1)..(1143)
atggagcgcgttctgatcaacgacaccactctgcgcgacggcgagcagtctccgggcgtagcgttccgtacttctgaaaaagttgctatcgctgaagcgctgtacgctgctggtatcactgcaatggaagttggtactccggcaatgggcgacgaagagatcgctcgcattcagctggttcgtcgtcagctgccggacgcaactctgatgacctggtgccgtatgaacgcgctggaaatccgtcagtctgcagacctgggtatcgactgggttgatatctccattccggcatctgacaagctgcgtcagtacaaactgcgtgaaccgctggcggtactgctggaacgtctggcgatgttcatccacctggcgcacactctgggtctgaaagtttgcatcggttgcgaagatgcttctcgcgcttctggtcagactctgcgcgctatcgctgaagttgctcagaacgcgccggctgctcgcctgcgttacgctgacaccgttggtctgctggatccgttcaccactgcagctcagatctccgcactgcgcgacgtatggtctggtgaaatcgaaatgcacgcgcacaacgacctgggtatggcgactgctaacaccctggcagctgtttctgctggcgcaacttctgttaacaccaccgttctgggtctgggtgaacgtgctggtaacgcagctgcatggaaaccgtctgcactgggtctggaacgttgcctgggtgttgaaactggcgttcacttctctgcactgccggcactgtgccagcgcgttgctgaagcagctcagcgtgctatcgacccgcagcagccgctggttggtgaactggtattcactcacgaatccggtgttcacgttgctgcgctgctgcgcgactctgaatcctaccagtctatcgcgccaagcctgatgggtcgttcttaccgtctggttctgggtaagcactctggtcgtcaggctgttaacggcgtattcgaccagatgggttaccacctgaacgctgcgcagatcaaccagctgctgccggcaatccgtcgcttcgctgaaaactggaaacgttctccgaaagactacgaactggttgctatctacgacgaactgtgcggtgaatccgcactgcgtgcgcgtgga

SEQ ID NO: 270 - protein, 381 aa, Klebsiella pneumoniae; identical to SEQ ID NO: 76

SEQ ID NO: 271 - DNA, 1146 bp, Klebsiella pneumoniae
  misc_feature (1)..(1146): Wild type
atggaacgcgtgctgattaacgataccaccctgcgcgacggcgagcagagccccggcgtcgcctttcgcaccagcgaaaaggtcgccattgccgaggcgctttacgccgcaggaataacggcgatggaggtcggcaccccggcgatgggcgacgaggagatcgcgcggatccagctggtgcgtcgccagctgcccgacgcgaccctgatgacctggtgtcggatgaacgcgctggagatccgccagagcgccgatctgggcatcgactgggtggatatctcgattccggcttcggataagctgcggcagtacaaactgcgcgagccgctggcggtgctgctggagcggctggcgatgtttatccatcttgcgcataccctcggcctgaaggtatgcatcggctgcgaggacgcctcgcgggccagcggccagaccctgcgcgctatcgccgaggtcgcgcagaatgcgccggccgcccgcctgcgctatgccgatacggtcggcctgctcgacccttttaccaccgcggcgcaaatctcggccctgcgcgacgtctggtccggcgaaatcgaaatgcatgcccataacgatctgggtatggcgaccgccaatacgctggcggcggtaagcgccggggccaccagcgtgaatacgacggtcctcggtctcggcgagcgggcgggcaacgcggccgcatggaaaccgtccgcgctgggccttgaacgctgcctgggcgtggagaccggcgtgcatttttcggcgctgcccgcgctctgtcagagggtcgcggaagccgcgcagcgcgccatcgacccgcagcagccgctggtcggcgagctggtgtttacccatgagtcaggtgtccacgtggcggcgctgctgcgcgacagcgagagctaccagtccatcgccccttccctgatgggccgcagctaccggctggtgctgggcaaacactccgggcgtcaggcggtcaacggcgtttttgaccagatgggctatcacctcaacgccgcgcagattaaccagctgctgcccgccatccgccgcttcgccgagaactggaagcgcagcccgaaagattacgagctggtggctatctacgacgagctgtgcggtgaatccgctctgcgggcgagggggtaa

SEQ ID NO: 272 - DNA, 1158 bp, Methanococcus vannielii SB
  CDS (1)..(1158)
atggactggaaagaagtttctcagtacaacccgaaactggacctgaaagagtgctacgtttacgacaccactctgcgtgacggtgaacagactccgggcgtttgcttcaccggtaaccagaaactggaaatcgcgaagaaactggatgacctgggtatcaagcagattgaagctggcttcccgaccgtttctgaaaacgaacgtaagtgcatcaaatctatctcttctgaaggtctgaacgctgacatcctggcgctgtctcgcgtactgaaagaagatatcgaccgcgctatcgagtgcgacgttgacggtatcatcactttcgttgcaacttctccgatgcacctgaaatacaaactgcacaaatctttcgaagaagttgaagagatgggtatgaaagcaatcgaatacgctaaagaccacggtctgttcgttgcattctctgctgaagatgcaactcgtacttccatcgaaaacatcatcaaaatccacaaaaacgctgaagattacggtgctgaccgcgttcacatcgctgacactctgggttgcgcaactccgcagtctatgtaccagatctgctctgaactgaacaagtctctgaagaaagcgcacatcggtgttcactgccacaacgacttcggtttcgctgctatcaactccatctacggtctgatgggtggtgcgaaagcggtttccactaccgttaacggtatcggtgaacgtgctggtaacgctgcactggaagaagttgtaatggcgctgaaagttctgtacaactacgacatgggtctgaacactgaactgatcatggaaacttctaaactggttgaaacttactccaaaatcaaagttccggaaaacaagccgctggttggtgaaatggtattctaccacgaatccggtattcacgttgacgcagtactggaaaacccgctgacttacgaaccgttcctgccagagaagatcggtcagaagcgtaagatcgttctgggtaaacactctggttgccgtgctgttgcttaccgtctgaacgaactgggcttcgaagcaactcgcgacgaactgtgggaaatcgttaagaaaaccaaagaaactcgtgaacagggtactgaaatctctgacgaagtattcaaaaacatcgttactcacattcttaac

SEQ ID NO: 273 - protein, 386 aa, Methanococcus vannielii SB; identical to SEQ ID NO: 12

SEQ ID NO: 274 - DNA, 1161 bp, Methanococcus vannielii SB
  misc_feature (1)..(1161): Wild type
atggattggaaagaagtttctcaatataatcctaaattagacttaaaagaatgttatgtatatgatactacattaagggatggtgaacagactcctggagtttgttttacgggtaatcaaaagcttgaaattgctaaaaaattagatgaccttggaataaaacaaattgaagccggttttccaacggtttctgaaaatgaaagaaaatgtattaaatcaatttcctctgaaggacttaatgcggatattttggcgctatcaagagttttaaaggaagatatcgatagggcgattgaatgcgatgttgatggaataatcacttttgttgcaacttcgcctatgcacctaaaatataagctacataagtcttttgaagaagttgaagaaatgggaatgaaagctatcgagtatgcaaaagatcatggcctttttgttgcgttttctgcagaagatgcaacaagaacctcgattgaaaatatcataaaaattcataaaaatgcagaagattacggtgcagatagggtccatattgcagatacacttggatgtgcaacacctcaatcaatgtaccaaatatgttctgaactgaataaaagcctgaaaaaagcacatattggagttcattgccataatgattttggatttgcagccataaattcaatatacggacttatgggtggtgcaaaggcagtttcaactactgttaatggcattggagaaagggccggaaatgcagcactagaagaggtagtaatggctttaaaagtactttataattacgatatggggctaaatactgaacttataatggaaacttcaaagttagttgaaacatattcaaaaatcaaggttccagaaaataagcctcttgttggcgaaatggtattttatcatgaaagcggaatacacgttgatgcagttttagaaaatcctttaacctatgagccgtttttacctgaaaaaatcggtcaaaaacgaaaaattgtgcttggaaaacattctggatgcagagccgttgcatatagattaaatgaacttggatttgaagcgactcgtgatgaactctgggaaattgttaaaaaaactaaggaaacgagagaacaaggaaccgaaataagtgacgaagtatttaaaaacattgtaacacatattttaaattaa

SEQ ID NO: 275 - DNA, 1170 bp, Methanobrevibacter smithii ATCC 35061
  CDS (1)..(1170)
atgcagtactacatctctcactacaacaaagagccggaactgaacttcccggatgaaatcaccgtttacgacaccactctgcgtgacggtgaacagactccgggcgtttgcttctctccggaagagaagctggaaatcgcgaagaaactggatgaagttaaaatcaagcagatcgaagcaggcttcccgatcgtttccaagaaagagcaggaatccgttaaagcaatcacttctgaaggtctgaacgcacagatcatctctctgtctcgtaccaagaaagaagatatcgacgctgcactggactgcgacgttgacggcgttatcactttcatgggtacttctgacatccacctggaacacaaaatgcacattggtcgtcaggaagcgctgaacacttgcatgaacgctatcgaatacgctaaagaccacggtctgttcgttgcattctctgcagaagatgcaactcgtactgacctggacttcctgaaacgtatctacaacaaagctgaatcctacggtgctgaccgcgttcacattgctgacaccactggcgcaatcactccgcagggtatcacttacctggttaaagaactgaagaaagacgtaaacatcgacatcgcgctgcactgccacaacgacttcggtctggcggttatcaactccatctccggtgttctggcgggtgctaacggtatctccactaccgtaaacggtatcggtgaacgcgctggtaacgcttctctggaagaagttatcatgtctctgaaactgctgtacggtaaagacctgggcttcaaaaccaagcacatcaaagaactgtctgaactggtttctaaagcgtctggtctgccggttccgtacaacaagccggttgttggtaacaacgtattccgtcacgaatccggtattcacgttgatgctgttatcgaagagccgctgtgctacgaaccgtacatcccagaactggttggtcagaaacgtcagctggtactgggtaaacactctggttgccgcgctgtacgcgctaaactgaacgaatgcgacctggacgtttctgacgacactctgatcgaaatcgttaagaaagttaagaaatctcgtgaagaaggtacttacatcaacgacgacgtattcaaagaaatcgttaaatcctgcaactacaagaaagaa

SEQ ID NO: 276 - protein, 390 aa, Methanobrevibacter smithii ATCC 35061; identical to SEQ ID NO: 11

SEQ ID NO: 277 - DNA, 1173 bp, Methanobrevibacter smithii ATCC 35061
  misc_feature (1)..(1173): Wild type
ttgcaatattatatcagtcattataataaagaaccggaattaaattttcctgatgaaattacagtttatgatacaactttaagagacggtgaacaaaccccaggagtttgttttagtcctgaagaaaagttagaaattgctaaaaaattagatgaagttaaaattaaacaaattgaagcaggttttcctatagtttccaaaaaagaacaggaatcagtgaaagccataacttcagaaggccttaatgctcaaatcatttctttatctagaacaaaaaaagaagacattgatgctgctcttgattgtgatgttgacggtgttattacatttatgggaacttcagacatccatttagaacacaaaatgcacatcggacgtcaggaagcactgaatacatgtatgaacgctattgaatatgctaaagatcacggattatttgttgcattttctgcagaagacgcaaccagaactgatttggatttcttaaaaagaatatacaacaaggctgaaagctatggagcagacagagtacacatagcagacactaccggtgctataactccgcagggaattacttacctggtaaaagaacttaaaaaagatgtaaatatagatattgctctacattgtcacaatgatttcggtctggcagttataaattccatatccggagtactggcaggagctaatggaatttccacaacagtaaacggtatcggagaacgtgcaggaaacgcatctcttgaagaagtaattatgtctcttaaattattatacggtaaagatttaggatttaaaaccaaacatattaaagaactttccgaacttgtatcaaaagctagcggattgcctgttccctataacaaacctgtagtaggaaacaacgtattcagacacgaatccggaattcatgttgatgcagttattgaagagccgttatgttatgaaccatatattccagaactggtaggacaaaaaagacagcttgtattaggtaaacattcaggctgcagagcagtcagagccaaattaaatgaatgtgaccttgatgtaagcgacgatacccttattgaaattgttaaaaaagttaaaaaaagcagagaagaaggaacatacattaacgatgatgtattcaaagaaattgtaaaaagttgtaactataaaaaagaatag

SEQ ID NO: 278 - DNA, 1161 bp, Methanococcus aeolicus Nankai-3
  CDS (1)..(1161)
atgaactggaaagaagtttgccagtacaacccgaaactgaacctggaagattgctacatctacgataccactctgcgcgacggtgaacagactccgggcgtttgcttctccatggagcagaaactggacatcgctaagaaactggacgaactgggtgttaagcagatcgaagcgggtttcccggctgtttctaaatctgaaatcgaaaacgttaagaaaatcgctaacgaaggtctgaacgctgaaatcctggcactgtctcgcgcactgcagggcgacatcgacaaagcgctgtcctgcgacgttgacggtatcatcactttcatcgcggcatctccgctgcacctgaaatacaaactgcacaaatctatcgaagaagttgaagagatgggtatgaaagcggtagaatacgctaaagaccacggtctgttcgttgcattctctgcagaagatgcaactcgtactccgatcgaagatctggtacgtattcacaaaaacgctgaagagcacggtgctgaccgcgttcacattgctgacaccactggctgcggtactccgcagtccattcagtacatctgctctgaactgtctaacaacctgaagaaagctcacatcggcgtacactgccacaacgacttcggtctggcggttatcaactccatctacggtctgctgggtggtgcgaaagctgcttctactaccgttaacggtatcggtgaacgtgctggtaacgcaccgctggaagaactgctgctgaccatgaacgtactgtacgacgttaaaactgacctgaacatctccatcatcaaagaactgtctaccatggttgaaaactactccggtatcaaaatcccggttaacaagccaatcgttggtgacaaagtattctaccacgaatccggtatccacgttgacgctgttatcgaaaacccgctgacttacgaaccgttcctgccggaacgtatcggtcagaagcgtgaaatcgttctgggtaaacactctggttgctccgcagtagaatccaagctgaaagagctgggtctggaagttccgaaagaccgtatctgggacctggttaagaaagttaaaaccactcgtgaaggtggtgaagatatcgacgacgaaatgttcatcaagatcgttgacatcatcaacaagcag

SEQ ID NO: 279 - protein, 387 aa, Methanococcus aeolicus Nankai-3; identical to SEQ ID NO: 13

SEQ ID NO: 280 - DNA, 1164 bp, Methanococcus aeolicus Nankai-3
  misc_feature (1)..(1164): Wild type
atgaattggaaagaagtttgtcaatataatccaaagttgaatttggaggattgctatatttatgatactacacttagagatggggagcaaactccgggagtttgtttttcaatggaacaaaaattggatattgctaaaaaattagatgaattgggggtaaagcagattgaagcaggttttccagccgtatctaaatcagaaatagaaaatgtaaaaaaaatagcaaacgaaggactaaacgctgaaatattggcgttatctcgggcactacaaggagatattgataaggcattatcctgtgatgtagatgggattattacatttatagcagcttctcctcttcatttaaaatataaacttcataaaagcatcgaggaagtagaagagatgggaatgaaggcagtggaatatgcaaaagaccacgggctatttgtagctttttcggctgaagatgctacaaggacaccaattgaggaccttgtaagaattcataaaaatgcagaggaacacggagcagatagggttcatatagcagatactacgggctgtggaacaccacaatccatacaatatatatgttcagaacttagcaataatttaaaaaaggcacatattggagttcattgccataatgattttggacttgccgtaataaattctatttatggactattgggtggtgcaaaagcagcatctaccacagtaaatggaattggggaaagagctggaaatgcacctttggaggagctcctattaactatgaatgtattatatgatgtaaaaactgatttaaatatctcaataataaaggaattatcgacaatggttgaaaactattcggggataaaaataccagtaaataagccgatagtaggggataaagtattttatcatgaaagcggaattcatgttgatgcagtaattgaaaatccactaacttatgaaccatttttgccggaaagaatcgggcaaaaacgagaaattgtattgggaaaacattctggttgtagtgcagtcgaatcaaaattaaaagagcttggcttagaagttccaaaagatagaatatgggatttagttaaaaaagtaaaaaccaccagagaaggcggggaagatatagacgatgagatgtttataaaaatagtagatataataaataaacaataa

SEQ ID NO: 281 - DNA, 1158 bp, Methanococcus maripaludis S2
  CDS (1)..(1158)
atggactggaaagcggtttctccgtacaacccgaaactggatctgaaagactgctacctgtacgacaccactctgcgtgacggtgaacagactccgggcgtttgcttcgctggcgaccagaaactggaaatcgctaagaaactggacgaactgaaaatcaagcagatcgaagcaggcttcccgatcgtttctgaaaacgaacgtaaagcaatcaaatctatcactggcgaaggtctgaacgctcagattctggcactgtctcgcgtactgaaagaagatatcgacaaagcgattgagtgcgacgttgacggtatcatcactttcatcgctacttctccgatgcacctgaaatacaaactgcacaaaaacctggatgaagttgaagagatgggtatgaaagcggttgaatacgctaaagaccacggtctgttcgttgcattctctgcagaagatgcaactcgtactccgctggaagatatcatccgtatccacaaaaacgctgaagaacacggtgctgaccgcgttcacattgctgacactctgggttgcgcaactccgcaggcaatgtaccacatctgctctgaactgtccaagcacctgaagaaagcgcacatcggtgttcactgccacaacgacttcggtttcgctgttatcaactccatctacggtctgatcggtggtgcgaaagctgtttccactaccgttaacggtatcggtgaacgtgctggtaacgctgctatcgaagaaatcgcgatggcgctgaaagttctgtacgaccacgacatgggtctgaacactgaaatcctgactgaaatctccaaactggttgaaaactactccaagatcaagatcccagaaaacaagccgctggttggtgaaatggtattctaccacgaatccggtatccacgttgacgcagtactggaaaacccgctgacttacgaaccgttcctgccggaaaagatcggtcagaaacgtaaaatcatcctgggtaaacactctggttgccgcgctgttgctcaccgtctgcaggaactgggtctggaagcatctcgcgacgaactgtgggaaatcgttaagaaaaccaaagaaactcgtgaggacggtactgaaatctctgacgaagtattcaaaaacatcgctgagaagatcatcaag

SEQ ID NO: 282 - protein, 386 aa, Methanococcus maripaludis S2; identical to SEQ ID NO: 6

SEQ ID NO: 283 - DNA, 1161 bp, Methanococcus maripaludis S2
  misc_feature (1)..(1161): Wild type
atggactggaaagctgtatctccgtacaacccaaaattagatttaaaagactgttatttgtatgatacaacattgagagatggtgaacagacccctggagtttgttttgcaggagaccaaaaacttgaaattgctaagaaactggatgaacttaaaattaaacagattgaagcaggttttccaattgtttctgaaaatgaaagaaaagccatcaaatcaattactggagaaggcttaaatgcgcagattttagcattatcaagagttttaaaagaagatattgataaagccatcgaatgtgacgttgacgggataattacatttattgcaacttctccaatgcatttgaaatataaattacataagaatcttgatgaagtagaagaaatgggtatgaaagccgtagaatatgcaaaagatcacggcctttttgtagcattctccgcagaagatgcaacgagaacccctcttgaagacataattagaattcataaaaatgcagaagaacacggcgctgatagggtccatattgcagatactcttggatgtgcaacaccacaggcaatgtatcatatatgttctgaactaagcaaacacctgaaaaaagcacatattggagtacactgccacaatgactttggatttgcagttataaactcaatatacggtttaatcggtggtgcaaaagctgtatctaccacagttaatggtataggtgaaagagcaggaaatgctgcaattgaagaaattgcaatggccttaaaagtactttacgaccacgatatgggattaaatactgaaatactaactgaaatatctaaactcgttgaaaactattcaaaaatcaaaattcctgaaaataaaccgcttgttggagaaatggtattctaccatgaaagcggaatacacgtcgatgccgttttagaaaacccattaacatatgaaccatttttgcccgaaaaaatcggtcagaaaagaaaaattatccttggaaaacattccggttgtagggctgtcgcacacagactacaggaactcggacttgaagcttcaagagacgaattatgggaaattgtaaagaaaactaaagaaactagagaagacggtactgaaataagcgacgaagtgtttaaaaacattgcagaaaaaatcataaaataa

SEQ ID NO: 284 - DNA, 1449 bp, Escherichia coli
  CDS (1)..(1449): Escherichia coli, succinate-semialdehyde dehydrogenase, NADP-dependent activity wt gene
atgaaacttaacgacagtaacttattccgccagcaggcgttgattaacggggaatggctggacgccaacaatggtgaagccatcgacgtcaccaatccggcgaacggcgacaagctgggtagcgtgccgaaaatgggcgcggatgaaacccgcgccgctatcgacgccgccaaccgcgccctgcccgcctggcgcgcgctcaccgccaaagaacgcgccaccattctgcgcaactggttcaatttgatgatggagcatcaggacgatttagcgcgcctgatgaccctcgaacagggtaaaccactggccgaagcgaaaggcgaaatcagctacgccgcctcctttattgagtggtttgccgaagaaggcaaacgcatttatggcgacaccattcctggtcatcaggccgataaacgcctgattgttatcaagcagccgattggcgtcaccgcggctatcacgccgtggaacttcccggcggcgatgattacccgcaaagccggtccggcgctggcagcaggctgcaccatggtgctgaagcccgccagtcagacgccgttctctgcgctggcgctggcggagctggcgatccgcgcgggcgttccggctggggtatttaacgtggtcaccggttcggcgggcgcggtcggtaacgaactgaccagtaacccgctggtgcgcaaactgtcgtttaccggttcgaccgaaattggccgccagttaatggaacagtgcgcgaaagacatcaagaaagtgtcgctggagctgggcggtaacgcgccgtttatcgtctttgacgatgccgacctcgacaaagccgtggaaggcgcgctggcctcgaaattccgcaacgccgggcaaacctgcgtctgcgccaaccgcctgtatgtgcaggacggcgtgtatgaccgttttgccgaaaaattgcagcaggcagtgagcaaactgcacatcggcgacgggctggataacggcgtcaccatcgggccgctgatcgatgaaaaagcggtagcaaaagtggaagagcatattgccgatgcgctggagaaaggcgcgcgcgtggtttgcggcggtaaagcgcacgaacgcggcggcaacttcttccagccgaccattctggtggacgttccggccaacgccaaagtgtcgaaagaagagacgttcggccccctcgccccgctgttccgctttaaagatgaagctgatgtgattgcgcaagccaatgacaccgagtttggccttgccgcctatttctacgcccgtgatttaagccgcgtcttccgcgtgggcgaagcgctggagtacggcatcgtcggcatcaataccggcattatttccaatgaagtggccccgttcggcggcatcaaagcctcgggtctgggtcgtgaaggttcgaagtatggcatcgaagattacttagaaatcaaatatatgtgcatcggtctttaa

SEQ ID NO: 285 - protein, 482 aa, Escherichia coli
MKLNDSNLFRQQALINGEWLDANNGEAIDVTNPANGDKLGSVPKMGADETRAAIDAANRALPAWRALTAKERATILRNWFNLMMEHQDDLARLMTLEQGKPLAEAKGEISYAASFIEWFAEEGKRIYGDTIPGHQADKRLIVIKQPIGVTAAITPWNFPAAMITRKAGPALAAGCTMVLKPASQTPFSALALAELAIRAGVPAGVFNVVTGSAGAVGNELTSNPLVRKLSFTGSTEIGRQLMEQCAKDIKKVSLELGGNAPFIVFDDADLDKAVEGALASKFRNAGQTCVCANRLYVQDGVYDRFAEKLQQAVSKLHIGDGLDNGVTIGPLIDEKAVAKVEEHIADALEKGARVVCGGKAHERGGNFFQPTILVDVPANAKVSKEETFGPLAPLFRFKDEADVIAQANDTEFGLAAYFYARDLSRVFRVGEALEYGIVGINTGIISNEVAPFGGIKASGLGREGSKYGIEDYLEIKYMCIGL

SEQ ID NO: 286 - DNA, 1425 bp, Escherichia coli
  CDS (1)..(1425): Escherichia coli, putative aldehyde dehydrogenase wt gene
atgcaacataagttactgattaacggagaactggttagcggcgaaggggaaaaacagcctgtctataatccggcaacgggggacgttttactggaaattgccgaggcatccgcagagcaggtcgatgctgctgtgcgcgcggcagatgcagcatttgccgaatgggggcaaaccacgccgaaagtgcgtgcggaatgtctgctgaaactggctgatgttatcgaagaaaatggtcaggtttttgccgaactggagtcccgtaattgtggcaaaccgctgcatagtgcgttcaatgatgaaatcccggcgattgtcgatgtttttcgctttttcgcgggtgcggcgcgctgtctgaatggtctggcggcaggtgaatatcttgaaggtcatacttcgatgatccgtcgcgatccgttgggggtcgtggcttctatcgcaccgtggaattatccgctgatgatggccgcgtggaaacttgctccggcgctggcggcagggaactgcgtagtgcttaaaccatcagaaattaccccgctgaccgcgttgaagttggcagagctggcgaaagatatcttcccggcaggcgtgattaacatactgtttggcagaggcaaaacggtgggtgatccgctgaccggtcatcccaaagtgcggatggtgtcgctgacgggctctatcgccaccggcgagcacatcatcagccataccgcgtcgtccattaagcgtactcatatggaacttggtggcaaagcgccagtgattgtttttgatgatgcggatattgaagcagtggtcgaaggtgtacgtacatttggctattacaatgctggacaggattgtactgcggcttgtcggatctacgcgcaaaaaggcatttacgatacgctggtggaaaaactgggtgctgcggtggcaacgttaaaatctggtgcgccagatgacgagtctacggagcttggacctttaagctcgctggcgcatctcgaacgcgtcggcaaggcagtagaagaggcgaaagcgacagggcacatcaaagtgatcactggcggtgaaaagcgcaagggtaatggctattactatgcgccgacgctgctggctggcgcattacaggacgatgccatcgtgcaaaaagaggtatttggtccagtagtgagtgttacgcccttcgacaacgaagaacaggtggtgaactgggcgaatgacagccagtacggacttgcatcttcggtatggacgaaagatgtgggcagggcgcatcgcgtcagcgcacggctgcaatatggttgtacctgggtcaatacccatttcatgctggtaagtgaaatgccgcacggtgggcagaaactttctggttacggcaaggatatgtcactttatgggctggaggattacaccgtcgtccgccacgtcatggttaaacattaa

SEQ ID NO: 287 - protein, 474 aa, Escherichia coli
MQHKLLINGELVSGEGEKQPVYNPATGDVLLEIAEASAEQVDAAVRAADAAFAEWGQTTPKVRAECLLKLADVIEENGQVFAELESRNCGKPLHSAFNDEIPAIVDVFRFFAGAARCLNGLAAGEYLEGHTSMIRRDPLGVVASIAPWNYPLMMAAWKLAPALAAGNCVVLKPSEITPLTALKLAELAKDIFPAGVINILFGRGKTVGDPLTGHPKVRMVSLTGSIATGEHIISHTASSIKRTHMELGGKAPVIVFDDADIEAVVEGVRTFGYYNAGQDCTAACRIYAQKGIYDTLVEKLGAAVATLKSGAPDDESTELGPLSSLAHLERVGKAVEEAKATGHIKVITGGEKRKGNGYYYAPTLLAGALQDDAIVQKEVFGPVVSVTPFDNEEQVVNWANDSQYGLASSVWTKDVGRAHRVSARLQYGCTWVNTHFMLVSEMPHGGQKLSGYGKDMSLYGLEDYTVVRHVMVKH

SEQ ID NO: 288 - DNA, 32 bp, Artificial; identical to SEQ ID NO: 161
  primer AT-Pa01_for_Ec

SEQ ID NO: 289 - DNA, 32 bp, Artificial
  primer AT-Pa01_rev_Ec
aaatttactagtacaagaaagctgggttcaag

SEQ ID NO: 290 - DNA, 41 bp, Artificial
  primer Fw_BstB1
aatcgaccgacctgtcgcatcacccgacgcactttgcgccg

SEQ ID NO: 291 - DNA, 35 bp, Artificial
  primer rev_Drd1
ctgcttcgaaccctgtggaacacctacatctgtat

1-25. (canceled)

26. A method for preparing adipic acid, comprising
converting alpha-ketoglutaric acid (AKG) into alpha-ketoadipic acid (AKA),
converting alpha-ketoadipic acid into alpha-ketopimelic acid (AKP),
converting alpha-ketopimelic acid into 5-formylpentanoic acid (5-FVA), and
converting 5-formylpentanoic acid into adipic acid,
wherein at least one of said convertings is carried out using a biocatalyst.

27. The method according to claim 26, wherein a heterologous biocatalyst is used.

28. The method according to claim 26, wherein alpha-ketoglutaric acid is biocatalytically prepared from a carbon source.

29. The method according to claim 26, wherein the biocatalyst comprises a biocatalyst catalysing C₁-elongation of alpha-ketoglutaric acid into alpha-ketoadipic acid and/or C₁-elongation of alpha-ketoadipic acid into alpha-ketopimelic acid.

30. The method according to claim 28, wherein the biocatalyst comprises one or more of:
a. an AksA enzyme having homo₍ₙ₎citrate activity or an homologue thereof;
b. at least one enzyme selected from the group of AksD enzymes having homoₙ-aconitase activity, AksE enzymes having homoₙ-aconitase activity, homologues of said AksD enzymes and homologues of said AksE enzymes; and
c. an AksF enzyme having homoₙ-isocitrate dehydrogenase or a homologue thereof.

31. The method according to claim 26, wherein the biocatalyst comprises an enzyme system catalysing conversion of alpha-ketoglutaric acid into alpha-ketoadipic acid, wherein said enzyme system forms part of an amino adipate pathway for lysine biosynthesis.

32. The method according to claim 26, wherein the biocatalyst is optionally heterologous and comprises an enzyme system catalysing conversion of alpha-ketoglutaric acid into alpha-ketoadipic acid, and wherein at least one enzyme of the enzyme system originates from nitrogen fixing bacteria selected from the group consisting of cyanobacteria, rhizobiales, γ-proteobacteria and actinobacteria, and is further optionally selected from the group consisting of Anabaena, Microcystis, Synechocystis, Rhizobium, Bradyrhizobium, Pseudomonas, Azotobacter, Klebsiella and Frankia.

33. The method according to claim 26, wherein alpha-ketopimelic acid is biocatalytically decarboxylated, thereby forming 5-formylpentanoic acid.

34. The method according claim 26, comprising converting 5-formylpentanoic acid into adipic acid by aldehyde oxidation.

35. A heterologous cell, comprising one or more nucleic acid sequences, which optionally comprise Sequence ID NO: 285, sequence ID NO: 287 or a homologue thereof, encoding one or more enzymes having catalytic activity with respect to conversion of 5-formylpentanoic acid into adipic acid.

36. The heterologous cell according to claim 35, wherein the cell is free of aminotransferases capable of catalysing the conversion of alpha-ketoadipate into alpha-aminoadipate.

37. The heterologous cell according to claim 35, comprising a nucleic acid sequence encoding an enzyme having catalytic activity with respect to decarboxylation of alpha-ketopimelic acid to form 5-formylpentanoic acid, wherein optionally said enzyme is selected from the group consisting of decarboxylases (E.C. 4.1.1), and can further optionally be selected from the group consisting of glutamate decarboxylases (EC 4.1.1.15), diaminopimelate decarboxylases (EC 4.1.1.20) aspartate 1-decarboxylases (EC 4.1.1.11), branched chain alpha-keto acid decarboxylases, alpha-ketoisovalerate decarboxylases, alpha-ketoglutarate decarboxylases, pyruvate decarboxylases (EC 4.1.1.1), and oxaloacetate decarboxylases (E.C. 4.1.1.3).

38. A heterologous cell according to claim 35 that is capable of being used in the preparation of caprolactam, 6-aminocaproic acid, diaminohexane or adipic acid.

39. A method for preparing a polymer, comprising reacting adipic acid which has been prepared by a method according to claim 26, with a compound having at least two functional groups capable of reacting with one or more carboxylate functions of adipic acid, thereby forming the polymer.

40. A method for preparing an adipate ester, comprising reacting adipic acid prepared in a method according to claim 26, with an alcohol.
